United States Patent Application Publication US 2022/0167576 A1 - sequence listing, part 6

SEQ ID NO: 30 - DNA, 35937250 bp, Oryza sativa (residues 10,569,781-12,683,736 of 35,937,250)
  misc_feature (5969519)..(5970518): n is a, c, g, or t
  misc_feature (13681864)..(13682863): n is a, c, g, or t
  misc_feature (13684155)..(13684254): n is a, c, g, or t
  misc_feature (18795366)..(18796365): n is a, c, g, or t
  misc_feature (24815509)..(24816508): n is a, c, g, or t
  misc_feature (35936251)..(35937250): n is a, c, g, or t
tggtgccatacaacgctttcaatcctcctccaccggtatgtattcaaacacctcaacctctctcaaaagcatgctcttgtctcttgttatgccatttgacagttcgaaatattatgctcaggagttcgcgttgatgaagtcggatcctccaatcgctcagcgccgatcacctcaccagcagactggtcaggggagtggaggaccaaaaattcggtctgatgctcaaccaaacacctctaaatgagccagccaatcagattcccgctagaggaaattggttctgagtgatgatgaaggcgatgatgctggaaaatttggaaataaagaggcgaccggaaaacaaccgaggcaagccaatccgaagaagaaaacatccagttgtcctatgccaaaaatcaggaagtcttctaggtacaaatcgtttggcgatcttccttgtattgacgctcactcattattaaaataatactgatagcacaactcaaactcgtaggaagacatctgacatagatccttctagaaaagactctgatccgactaacatggagacgggttcttcaaaagaaaccgagccgactacaaaagatcacccgagtgacaatcaaccggcaaccgacaatgtagaacccagcaacgaacccccgactggaaaccagtcggccgaagctggaattggagttaaccaggagcccccgactggaaaccagttgggcacagaaccaaaccaagagattcctgaagttgaaactcaagcgaactaccctcttggaaaggatgccagtaatgacccaggatccagctctcctgcaaaagcacaagagcctactcgtccccgaccggaaatcatcacaggtaaacacattatccgaaatcattttgatccgacaagctttctccaattgtttcaacgcttttcataaatgcctaaggcccgatggtcggcgacgaagaagaagtcctctggatacagtcagctgaggattctcgtccatccattttagtcaagtggtgggacgacgatatgcaaccccaaggaattgtgatcaataaacaaaaagaagatgaggaagtatgcctgctgaaaaaggcactcagccaggctactcgcattgtaaacgtaagattcttcatgcacagcctcaaccatcttgtttgccatttagctcaaatgccgataaaactgttttgcagagaatccatctcaggaatgaagcgaaaaccgcgaccctgtaaaaattagttccccatctcggaacccttgaggccacgagagactagctgcatgaagccaaagaacttgccaggaaaactgagcatgatctgagggaccggattgccgagctccaggaatccaactttgaactgagtggttcatcaaagggtaaatacaatctccgtctaacttacttgtgctgccatccttgtaatatcaattaatcaagaaacaatacagtgcaagccgccaggatttctgaactagagaggcggatccagactctggagaacgacaaggccgaattggagaaacagagggactcggccctgaaggatgttgagggtaccagtgactaatacttcttatctttatgcccacttgtcgatataaatctatttgtgtagatcgcaagatcaagtctcaggcgcaatttgatgtcttggtcaataagatcaagaggcttgaaggggccagggatgaagtcgctaacgctgctaccccactcgtccaagccatgttctttaataacaatggtccgagtacattcgatgcttccgaaatctttgacaagctgagagttgctccggatacatattttaagaatatcaaggaggctggaagtatgggagcgagcctggcattggcgatgaccaaatctctatacccgaagatcgatattgacgccattgatggcttcgcagatggtacaagcgaagaagctgctctcgacctcatcaacgatgcgtagaaagctgctgataagatagtggttgatgtagttgagagattctaggacaacgaccttcagccggttggttctgataactctgatgatgaaaaaactgataccaattgatgttatatcatagcgatgattctgatgacgatgatggaggcacaatttgtacaatactaatgaatttatgttgtgctcaatatttcaaacttagcttctgatttcttaaaagcttttgtcaaaccttattgagcctaaaacccgcaaaagctattaaaaaactttcagtcctcattgactaagccaaaaaatcaagtaaggcaatgataaatctagtaagcaaattgaattgataaaaatcacactccattgttattatagtagcccccgactgataactcaagggaaaacttgatgttagcagtcaaaatagggaaatacaaaagtaatgcttaagcataaaaatgacgaagatgttcaatattccaagagttgtcgataggagtaccgtcttcacgcttgagtcagtaggagcctggccgagtgacttcggagattatgaatggcccttcccataagggggataacttgtgcctatctcgtgtagtttgaatttttctcagaaccaggtcgccgactaagaaggctcgtgatcgagcattacgattatgataacggcgcaacccttgcaagtatcgggccgactgaattaaggctgcttcgcggacctcttccagtcggtttagatcatctactcggtcttctccatagcgctcctcgcgaaagttgcgaaatcgtaaagattcaaattccacctcactaggcaacattgcttctgctccataaactaggaagaacggcgactggcccgtggcccgactgggattagtgtgcaaggaccaaagtacagacgtcagctattctacccacttgccggcatagggattcagtcggtcaaaaactcgtgcctttattccttggagtaccatgccattggctcgttcgacttgtccattgctcatatggtgcgctacggaggcataacagattttaatgtcgaagtcttcacagaagtctttaaatactccaccagtgaattgagtgccattatcagtgatgatccgattaggtaccccaaaccggtgcacaatattgatgaagaaatctctagccttgtctgccgtgattgtgatgactggtttagcttcaatccacttggagaatttgtcgacagccacaaagagatgagtataaccaccgactgcctttttaaacgggccgaccatgtcaagcccccaaaccgcaaacggccaggacaacgggatggtttgcaactcttgggctggtagattagtttgtctggcgaaaaattgacaaccttcacatgtccgcacaatcttgtcagcgtcggacacagctgtaggctagaaaaaaccttgccggtaagccttgccgacaatggtccgtgcagcagcgtgattgccacaaatgccagaatctatgtcctttaacaattgtctcccctcctccaaagacacacagtgttgcaggattcccgatggacttttcttgtacagctcggcctcgtgaatgatatagagcctgctacgcctggagatccgctcggcttcatccttatcttgggggagttcttgtttggtcagaaatcttataaggggctctctccagtcggcttcgatcatacccacgtcttgagtgtccgtggcctcgattgtttctttccttggtatggttggttcataaagatgttcaacaaacacgtcggaaggagcggcttctcgttttgaactgaagttagcgagtctgttggctgcttcgttattgtgccgaagaacgtgggtgagttcgagcccatcgaacttgtcttccagcttgcgtacctcttgccgataagcggtcatgttatcatcaaggcaggaccactctttcataacttggttaacgaccaactgagaatctccacgaactatcagacgccgaattcccaaagagattgcaatccttagtccgtgaagaagcgcctcatattccaccacattgtgagacgtagaaaaatgtatccacaatacgtagctcagtctttctccagtcggggagatcaaaacgaccccggctccagtgcctgaaagcctcttcgacccgtcaaaatgcatggtccaatactccatcttttcctcgggcgtgtcttcttggcactcagtccactcggcgacaaagtcggccaaagcttggtacttgatcgaagttcgcggcttgaaggatatatccaaggacatcaattctaaggcccactttgcgattcgtccatttgcttcacgattatgaagtatatccccgagtggaaatgatgtaaccaccgtgaccgagtgactttggaagtagtgagataatttcctgacggtaattaaaacaccatataatagcttttggacctgaggatatcttgtcttggagtcggccaagacctcgctaacgaagtagattggtcgttggactttttgaacatggccttcttcttcacgctcaacaaccaggaccatgctcacaacctgagaagttgccgacacgtacaacaatagcggctcttgcggatgtggtgaggccaaaactggtggagtggtgagaagtttcttgaagtcttcaaaggctttctatgcttcgggtccccactggaaattatctgttttctttaacagcttggagaagggcatcccccactcaccgagtcgtgaaacgaaccggctgagcgctgccatgcaaccaatcagcttttagacatctttctgggagatcggtggtttcatgttgaggatggcgttgattttctccgggttggcttgtatgcctctatgggacatcataaatccaagcagcttccctaacggtactccgaagatgcacttttcaggatttagtttcatcttgaaagcgcggatgctcgcaaaggtttcttctagatccgtaatcaagtcatccttctgcttggtcttgacgactacgtcatccacataagcttcgacgttgcggccgatctgagtcgaaaaagcgttggtaagttgctcctgcattcttcaatccaaaaggcatagtgatatagcagtaggccccaaagggcgtgatgaatgaagtcttcaagcagtcggattccttcagtcagatctgatgatatcccgagtagcaatccaaaaaactaagtcgctcgcagccggcggtcgagtcaactacctagtcaatgcgaggcaacccaaaagggtctttgggacaagacttgttgaggtcggtgtaatcgacacacatgcgccattgcccggtcttcttccgaaccaggactgggttagctagccagtcgggatgaaggacttctttgatgaagcccgctgctaacagcttggtcaattcctccttgatcgcgtccttcctgtcttgtgcaaaacggtggagtcgttgtttgatgggtttagtgtctttcttaacgtgtaaagagtgctcaatcacctctctaggaataccaggcatatcggatggtttcgacgcaaagatatctttattattttgatgaaaggtgatgagcgcgctttcctatttacaatctaactcagcgcctattacagcagtcttactaggataagaaggatctagaggaattttcttggtcttggcttcgctttctccactctttgagatcttggttgcaggcacttccccttcgcttgccgtggttgaagccagtcggatgtcttcttgggtgatcgcgatctcgcgagtttgggccatctcgcagctttccttgtcgcatgtgacggcttgtttgatgtcacttcgcagggatatgactcctcgaggaccaggcatcttcatcatcatgtaggtatagtgcgggagagccataaatttggctaacgccgggcacccgagtttggcatgatacgctgtctcgaaatcagcaacttcgaagcagacgttttctgtgcggaagttctcccgagtaccgaaggtgaccggaagagtgatctggccgagtggcgtagcagataaccctggaatgactccatgaaagggcgcattactctgtttcaattctgtgcgaggtatctgcatgttgtccaaggtcttggcgaagaggatgttgagtgcactgccgccgttgatgagggatctgcgaagcttgacgttgtgaaccactgggtctagtaccaggggctaccgccccgggtggaccactcggtctggatgatccgagcggtcaaacttgattgttgtttccgaccaccgaagatattggggcgtatcaggctgaacaacgttaatctcctgttcggtcagcttttgttttcttttagattcataagccaggggtccgccaaagatgtggttgagctccttgcgatggtcttgaaaacctgtcgaggcgtcatcgtcatcgtccttcttttttgacgtgctttgatctccatcggaagccttccgtgcattcttggcgtattgttctgcaaactgcttgtagacgaagcaatctttggctgcatgattggaattgggatgatgcggacattgggagttcatgatcttgtcaaaagtattgacgcgcgaacgttgtcgggaggaatgtgtagtagttgcaacaagttcctcgggcttacgcttacggtccttgtgattggtacttccacccctcccgtagtcggcgtatctttctttggcttccaagtggtacccaactgcatggatgcgataatggcatcttcggctttggcatactcgttggctttttcgaacatctgcttgaccgtcctgggaggcttgcgcccgaacttgccgactagatcttcgtgacgaatccccttggtgaaagcagcaatgatgacgtcatcggtaatgtcggagatcttgttgcattgttcagaaaagcgccggatataatctcgaagggattctccagacttctgaatccgttgtagagatcgaactgtgtgccagggcgttcaaaggtgccctgaaagttggcgatgaagtggtcgcgaagttctgcccatgatctgatcatgccacggggtaacccatgaagccaggaccgggcagaatccgctagggccacaggcaaatagtttgccatggctttgctgtctcctcctgctgcgcgaattgcaagaccgtagacggtgagccaagactccgggttagtggtgccgtcatacttctcgattccagtcggcttgaagccggctggccaattgtcgcgaccgagaaaattgccttttcccgaacgctagtgtattaatccccgtcccaggaaaagccggggtacaccacacaaacatgatataaaagacacatctttattatatcgataatatttacattattacaaaggcacctcaggcctgacaaacaaaaataaacagcagtggactcgcgggcctacggctccatcttcacaggcgctcaactggggtataagccaggactccacctaagacttcttctccaaagcttctcttactgaaggggggaaagattgagcaagaatgagtacaaccacagtactcagcaagccacaccggtggatgcatgattaatgcaagggggtacaaggggtaatgatataggggttaagttttgcagaaaacagcatttaaaagtcacttagttgcccaaagccatttataaagacgatcctagagctacacaatattattaaacaaggccgtgaaccctcacgaacctgccttaacccaaggcctacgatgattcagaccgaactggcaacccgaccctgggtcccagctcgtcccaagccaacccaggccaaccattccacattttagttgttaagcaaattttaagaattaaaacactaacttgggtacattgctcggcttgcccataaccgagggcgcggctattcgaatagattatactctgatcagaggtgtacatctttacccacaagacacatcttcctcacgtgtaaccacgtgccacataccaccacggtatacggacggaagacgtgacatagttcccaacccatcctagccataaacaagagtaccgacccaaccccacctacggccggaacctccgggacaggtaggcaggattgagcccctagcagcaggacaccagccctgtgccatgacatctcgactaccgggccgcagctcgtgtagccttcatttgtcctagagatgtccatcgacccccgacttcgtccatctccatccgtgtacttttgtttataaccagtctgagctacaaactaagccttacccactagacatgtggaagtacggtagtgctttgcaacagaggcccgagcttaatccttatagtggccggggtgctacttcccacaactggcatgcacccaaaccccaccgaaaaacaggttttaggggctttgaaagaggaagagaggggtatgtccaattccaccataatccaacaattccataatgtccaaatgatatgagatttcccaaagtctaaagttataaaaccacctaatgttgcctaattaaccagcgaagcatctacctaagttcatactagtggaaccataaatagagtacccactagttggggttttatttaatctagggtgaacaaggtaataataacaataacaataataataaggtcataacaaaggtagataggcatggctaaataaaacagtgataacgcgggaatttaaataaagcgataatgcaataatttaaagcaacataattttataaactgggattcaatatgttcaaggatgatgtgacttgccttgctcagagagaacggccttccgaaccttcggcgacgaccgcgaaccacgcttcgggaacctccggaacgacagaagctacgcgaagcacacaagcaaagctacaagcctataaagaagcaataacaatacataaaaagaaagcacagggttctttaggttataacaaacattaggagacttgaacgggtcgattcatagttcgtatgaccaagatatgatcatccgaagtttaatgctgttatatggagatttgcggattattataattaagctttgcaattataaaacatgtgtaagcgctagcctagaaaagacaggaaggctgcgccgttgacatgcggaccccacatgtcaacctaaaggaccacggtagaccgagtacacagagacggtccacgggtcgacggaagcggaccccgtgtgtcaaccgaggcgagtggccaacaaacggactccactagacaccacacgggctgcacacgtagaaaccacgctgctaccgagcgggcacactaacacggtcaccacacgcacaagcgaacgactaccgacaccggtacacgggtactggggtcgacaaccgcacaacgggtacggggcgacaccgaaaggacgaggacggggcagcgagaggacggatccttaccaccacgcgacgaggcgtgggaacgacaacgacgaacgggcgcggcggagacagacgggcacaacggagacgaacgacgaggggacggcttcggcggcgatccttggacgaaggcgagacgcggctggcacgaggcttgacgacgcggagccgaggacgaagacgacgacggctacagcgaccttgacgaaacaccgaggacggacgagaacggctcggcggagggacgaacgccacgacgactgggagcgacgagaggacgacgacgacgacgaccggggccggcgaggaggcgacgagggacagccagcagcggctgcacggatgcgaggacggcgtggaacacgccgcagcgatgcccacgacggaggcggcgccgcgagacgacgaaccgggcgaccgacgggacgtcgacgacgagaacgaacggaggcgacgacgatggaccgcggaggggtttggatggaggggaagcgatgccgaggacgaccttgccgctgcgatgccagaggtggagacggcgacgtcggccggcgcactggcacggcggaaggggctgccggagtgggtgccgacgagaccgagggagaggcggcgcgggcgacggcgttccggcaaaaccgagggcaggccggggtggagggcgacgcggcgacgccgagggaggagacggcgcagccggcccgcacctgagcggcgcggcaggggcggctggaggcagtacagtggcggcaacgccactgttttgccggcgaggacacgtctccggtgatttccccacgaattggaggcagcgccggcgaagaggaggcggctgcgacgccggggaaggcgacggcacggccgggcggcgctcgggcgaggagagagaggcggctggaggcggccggcggcacgggagagagaggaggacggcggggagaggtgatgcggccacggggaagctcgggaaggggctaaaacgagagaacgcacggagggggttccgttttataggggaggagagggagccggccacgggaggagtggggaacggcggcggagtttgtggccggcggccatggaaggtggccgaggttggcgcgtccgttcccggcgattgggggcgccattcaagggggaattaagggggaaagagagaggagggaaaggggattaattccccctaattaatttggaaggaacggttggattcggggcggatttggaggaggaaacgagctagggttcgcacaggagagagagaagccgggcaggaggaaggagacgaccgggtgggtgggacccaccggtcgggcgcgcggcgtcaacgcgcgtgcgcacgcgggaggggagcggctcgggaggctgggtggggcggcttgggccgggcggcggcccaggcgggaggaggcgggagaaggtgggccgggaaggagaggagggaggggcggcccaggagcaggaggagaggagggagtgggctgcccgggaggggaagagaggcccgggagagagaggggaaagagagggaggagagggagactttgggctgggccgagagagagagagggaggactttgggccagacttggcccaaaggagggagagggatttatttttagtttttctttttagtaaactttgataattgtttttgttgcttaataattatttccggtgttctgaaaattcaagtaaaatttgagggctccttttagaccaaggagaatttaacaaaaattctctgggccacattcgaatttttcttgtacgtattttagtgtttgccaatttcttttcgaattttaattaattctattattccttttagaaaatgaattttatttcggaatgaatttatcaggacgtgacaaatccaccccccttacaagaatctcgtccccgagattcgaggaggctagcaagaagataggttgggcggtcttctcttcttgtctgacttcttccgtcgcgtcttctataacgaacttgcctagcaaaacttctccactctggactgcttgtctcgatctcctgttgcagatggaatcttctgttcacccgacttgtccctggttgcacctttaactgactcagactaggctgcggtagttgaggatggggcttcagtcctagaacttcttatcattcatatctttggcgtcaacctcatacaagttaccaccttcgtgacatgcgtcgacatcagctttgtcattactaggatatcatgtttggcaacttgcccctaactgcctcatattagctttcctggtctccgggtgctagctacttctgctattcgatgcaagggtgatgaaccctgagttcctctcgacactcaaggctgttgttggcccgatctttcggtgagttgtgataactacgatttgggagaaacgttgacgatccgactacaaccgtacgagacgttgtgttgcgccttagcgatcgatacacctctccgtgggttgctgatcttgccggtgcagatcaaccctattcctgcaagcaaatcgaagaaacaagcaagaacaagataaaagcaatctgatattgcaaataggaatttaatacaaatgataagttggggttccgaagaacaagcagacggacggtctagccgacacgcgcgctgcaagcaagtagcaatggctaaactttaatctaacaaaacccaagaaaccctgaaggggtaactagctatatataggggtgggaggacgacctaggggtgcctagggtcgtgctccaccagcttggggcgcaccccacatgggccccacctgggccggggtcccaaatgaggttacaagcccataggcccattacaggtgtcacagcaccttgtttcttcagttgctgccgactgagatggaatttggcaatgaggcttaatgcattggaaagaggactccgagagctttccatcaagtactcacgggctgaaaacggaggtcgtatggagcttcggcggccgtttgaagtcagcagtgtagcaggtggccgaattggattttggcacttggaggactcgaacttgatatcttgttgttcatccatgatgtgagcaacggatgtatccgtagtagccatggtcacatcatcctccccttcttcacgaaaaaccgtcctcggtttttccatatggtgttcttcatatagtccattcaaaataacctgtttcatccaatcaaaactagagaaactcgaaatagtgtgattagcaataacatgtttctctaaatccaaacaaatgaaaactctatgcaccaaatatattcctctatcattatatttgccaaagatatgaaaaatagcattagttagacatggcaaatcagacttagcaaataatttctccttcaaattatcgagctcaccaaaatcatcaaactgaacatagcccaaagtatttaaagaagatagcaatttacgttcctcaacttcattaacaatatgaacagcatgcttaaaatcagcacacaaagaaacactaggaatagcatgttcattcactagttgtggcatggatataagtgaagcattatcacacaactcttctttatcacaaggaacagcgagtaaatcaacttgtgacaaaggaattccagcatttggttccactaacggttgctctacttttgcatgaaaagtggacaaatttacttcgttaacaatgcactcaccttgattaatttcagtaccatttactttaccttggatgtcctctttagatgatggaggtgtctcgaacttgagtgtgaacaatggaattggtggctctttcatgtctctctcctccttttcgtgattacgcacttcctgcaaatagttagtaattggaggcaaagacatagcgtgtttctttttcatatcctcctctattttactttcagcattgcaagcaagttgtaacaaatgagaaagagatatatatctttgacaatcaagcatgtcctgaatttctttgttaagcccacataaaaacctcaattctttagcttcttcgcattcatctaaaccacaacgtaataaacaagcttgcatatcatgatagtatgaagtaacagttctggtatcttgttttaaacattgtagtttgttgaacaaaatgtcagcataatacatgggaacataaacatctctgaaatatcgtttcaggtctttccaagattgtggtattttgttatgcctacaaagatgtttccaatcattagaagcatgtttaattaaaacactagaggcacacataaccttttgtttctccgacaagacatgcttttgaaattcactatcaaccgctagctcccaattaatgtaagcacgaggatcatagtttccctcgaaataaggcagtgcagatttgatcttacctagaacatcatcacttacctcataatggtcatgttgatccctcctcatgtctcgacgaagatgtcgatgttgagcacagctatccccaattatcttgcatatccctgccattgttagtagaaaacaagaaacatacacaaaaatatgcgcgttcctattaactactaggtagtggcagctcaaaaatcgcacacactcaagcttttaaccaagctcttacaagatcttaccaatgcaagtggaatagtgacatacaccgactcaaccaagcaccccaataaaggttggatgtatcgatgccttggcaaacacttgcggtacggctgtaatcaaatatgtggagctctgggtaggcttaaatatgtagcaaaggaatagcaaatgctcaaatcagataatgcaaagttgaataattgttcaaagtcaagtaccgtgctggtcctaggctagaacgtactagagacccgagcctagacacaaacgataccacaagatagcactaggaacaactcatgcccaactctgatatatgaagtttagctcaaacataacagtattttctcttttctttctttcttctttcttctttctttttctttttttttgttttttttggtgcggcttttttttctcttttttttttgcacctttctgcctttttttttctcacttttttcttgattttttttaacaaaaactgactcaaggacattaatgtaagattacagggactcaaacataaatataaaatttacagggactcaaatataaaagtctaaacccaaaattaaaattatacaaaaaatggaatgctgaatttatgccggttccgtttttccaaacagatctcgaaaccgacaccaaacaaaaattcgccaaggtgtttgacacaactcggaaccgtggaattgagggagggggtcggactcggccaaaggggcgagtgggactcggcaaggaggtggagtggatggcagccgaatttggtgtatgggataaaaaggaaactgatttttaaccaatccaatctactatatctttccaaaacaaacttgactacttccaaaatcagatatggtaattcaccttcctcctctcgtgcacgacacaggcacggccaaaacaaacacacacaaggatcggcaaactctagatgcaactcaagaactccaaaactaaccgacagaaacttctgaaaactacaaaaatagaaccgtggcagcgagccgattccgttttcgtaggtcccgacaacaacagagacacggtggcagcgacgactgtggtacaaaacgtgaccagaactcgaaactctaaacgaactagacgctaagaccagcaacacgacgtgacgatgcaacacaaaattcaacaaagcaaaaactgaaaagaacaatgcaatggcacaatatggctaggtaaatgatacgaatatttttgtatggctattttctggttataggaagataaaaactcaccgagcaacgaaagctctgataccacctgatgaaccctgagttcctctcgacactcaaggctgttgttggcccgatctttcggtgagttgtgataactacgatttgggagaaacattgacgatccgactacaaccgtacgagacgttgtgttgcgccttagcgatcgatacacctctccgtgggttgctgatcttgccggtgcagatcaaccctattcctgcaagcaaatcgaagaaacaagcaagaacaagataaaagcaatctgatattgcaaataggaatttaatacaaatgataagttggggttccgaagaacaagcagacggacggtctagccgacacgcgcgctgcaagcaagtagcaatggctaaactttaatctaacaaaacccaagaaaccctgaaggggtaactagctatatataggggtgggaggaagacctaggggtgcctagggtcgtgctccaccagcttggggcgcaccccacatgggccccacctgggccggggtcccaaatgaggttacaagcccataggcccattacaggtgtcacagcaccttgtttcttcagttgctgccgactgagatggaatttggcaatgaggcttgatgcattggaaagaggactccgagagctttccatcaagtactcacgggctgaaaacggaggtcgtatggagcttcggcggccgtttgaagttagcagtgtagcaggtggccgaattggattttggcacttggaggactcgaacttgatatcttgttgttcatccatgatgtgagcaacggatgtatccatagtagccatggtcacatcaaagggccggtaactttgcctttgaattatgtttctaaaaagaaccaacttatcccacttgacatgctttgacgtctccccaaatgactttactgctggacttgttatggtctgatcgtgatcctgccaaatctgaagcttcgttgttagatgtgattttaatctgacctctatagactatcttcgaacatatcacttggttcataactgggaatagctcccacgaacagacagctcggattcactttctttacatttggttcacttcccactattctcttcatgttgtcctcagttagcattcaacgtattcctttacacttttgaccttgatgtgttctttcccgatttctcttatcaatcacctttcgacctacttctttgcctggtaataaacatctttttcgatatcttctatcaatcatcttttgacctttgtcaactaagtactcttcactccgagagttgtggatgcttctggtgacgatgtggtacttgagcctgctgcctttcagagaaaccttcaagtggttcgtcaaaagctagactggcggttgttgcctttgatccaaagaggacacatctgaaactctcagtccaaacaaaagtctctttggctttttaatccaacatagtttaattggttttcttttccatcaacaggttggttattaactcgagattagtatatgattcctctgaaatgagaccctaggtctcctttatcagtaagcaattatacacataatcacatatccgcatcttccaaaagaatcctagtagaacttgtctgtattacacatttctcccttattacatgaatacaaggcactaccttaaacaaaaagggaagatgcttaacatcggtacattgtatcctcgacatgattcatccataaacataacaaactcattgtttataatcatgaatatatttatttattacatgattgctgcaaactcccggttacagtgataagtagcaaactgaaaatcacaaacatggctactcattctgattctggagaggtatagctggcattgttctagtgactacatcatccttgattggttctgtgatgatgtgataggactgcatattgctatcattcacaggggaaaattccttctgattactggttgaagtggataacggtcttctgcttggtatcaccctcctgaggttgattgcccttcgcttggcctggagtaggtcggggagagaaacaacttcttccatcgacgacaattctttgctgaggccgtcggtgcagagaatggttggtgctgaaggtattattgctatgatttattgcagagtcaggtgcagcaggaggagcatgggtgctgtggatgatatcgtcgatgttgctgttggagctgactaactgatgagacaatcgtagggttgttcgttggatttctgcggtcttggtcaacaacacactgagttggcaatccttgggcacatggtttgtaccttcgcatagaaaacgtgtgaccttgcgggtgggacatccacctggtggatggtcttcctcacaatgagggcaaagtgtgagacacatgctagcaacgtgtccaatttctccacaacgggggcatgcttttgattccatctcttcctcgccgagatgtcggagagactcatcttcataatccgaggagacttgatctgacccttcactatcagatactctgccgccatggcttaggaggtgctgggtcagctgtcgtgcacctcggaaggtatttcctctttgacgtctaggaatagttatccctgctggaggccattcggtgctggtaatagtcatcttacgtacttcttcttcagttcgcatcggtgcttttctcttctgattcttactcttcttgcctttggcttgcttagtacgtgaccccacgtggtacgaaaggctaggaggaaagcaattctcgggattcaatggattctctccattgggctctctactttgcacactaggctgcaagcttgacttggtgcgaggaggctggtttagcgatgtctgccctgctaaaccaaaggaaggggcttctttggcatatacccatggacaattcagggtatagtgtcctcgttctctacaatcgtgacaaaaggggacatcctcttctggcattggaagctcattgacctgggtggcaaatgctcgatcaaacacatactgattttggtcttgacttccaaccaatggtagctgtgaactaagcagcatgcttggaatggaccaagggtgtgccctggttaactctcttgaggccagtggtggattgagttgaaaacttgagttacttgaggcatacccgctgatattctttcctttttctctgttaaacatatgttacagggattgaggtgagagaggaaacaagccaggaaagaatagaccagaactagagacaggaccttaaaggaactaactcttcttgctgatgtgttatttgtttcacttattctgcaagttgattaagcaaacaacctagcatggtcacatcacaacccaccgatgcaaaccacacactacacacacaagcaaggaaacacacgacaaacgaaacactagagggtggcttaggttctgcgacgggttcccaagatcttcactccttcacagctggcttcactgcttcctccacttcgctagcggaccctgcggtcttccggaccttcggcgaacaattggcgacatcttcttcttcgcaaaactaaccaactagtactagttgaaatctgaagaaggaagaagggagtaaaccttttgcaaatagcacaggggaaaggaggaaaaagggactttcggaaatagttttatttataaaatatgtccttaggttttatccacttggcttatcctacagtcgagatggctctgataccagcttgtcgcgaccgagaaaattgccttttcccatcttcttcttcgcaaaactaaccaactagtactagttgaaatctgaagaaggaagaagggagtaaaccttttgcaaatagcacaggggaaaggaggaaaaagggactttcggaaatagttttatttataaaatatgtccttaggttttatccacttggcttatcctacagtcgagatggctctgataccagcttgtcgcgaccgagaaaattgccttttcccgaacgctagtgtattaatccccgtcccaggaaaagccggggtacaccacacaaacatgatataaaagacacatctttattatatcgataatatttacattattacaaaggcacctcaggcctgacaaacaaaaataaacagcagcggactcgcgggcctacggctccatcttcacaggcgctcaactggggtataagccaggactccacctaagacttcttctccaaagcttctcttactgaaggggggaaagattgagcaagaatgagtacaaccacagtactcagcaagccacaccggtggatgcatgattaatgcaagggggtacaaggggtaatgatataggggttaagttttgcagaaaacagcatttaaaagtcacttagttgcccaaagccatttataaagacgatcctagagctacacaatattattaaacaaggccgtgaaccctcacgaacctgccttaacccaaggcctacgatgattcagaccgaactggcaacccgaccctgggtcccagctcatcccaagccaacccaggccaaccattccacattttagttgttaagcaaattttaagaattaaaacactaacttgggtacattgctcggcttgcccataaccgagggcgcggctattcgaatagattatactctgatcagaggtgtacatctttacccacaagacacatcttcctcacgtgtaaccacgtgccacataccaccacggtatacggacggaagacgtgacatagttcccaacccatcctagccataaacaagagtaccgacccaaccccacctacggccggaacctccgggacaggtaggcaggattgagcccctagtagcaggacaccagccctgtgccatgacatctcgactaccgggccgcagctcgtgtagccttcatttgtcctagagatgtccatcgacccccgacttcgtccatctccatccgtgtacttttgtttataaccagtctgagctacaaactaagccttacccactagacatgtggaagtacggtagtgctttgcaacagaggcccgagcttaatccttatagtggccggggtgctacttcccacaactggcatgcacccaaaccccaccgaaaaacaggttttaggggctttgaaagaggaagagaggggtatgtccaattccaccataatccaacaattccataatgtccaaatgatatgagatttcccaaagtctaaagttataaaaccacctaatgttgcctaattaaccagcgaagcatctacctaagttcatactagtggaaccataaatagagtacccactagttggggttttatttaatctagggtgaacaaggtaataataacaataacaataataataaggtcataacaaaggtagataggcatggctaaataaaacagtgataacgcgggaatttaaataaagcgataatgcaataatttaaagcaacataattttataaactgggattcaatatgttcaaggatgatgtgacttgccttgctcagagagaacggccttccgaaccttcggcgacgaccgcgaaccacgcttcgggaacctccggaacgacagaagctacgcgaagcacacaagcaaagctacaagcctataaagaagcaataacaatacataaaaagaaagcacagggttctttaggttataagaaacattaggagacttgaacgggtcgattcagagttcgtatgaccaagatatgatcatccgaagtttaatgctgttatatggagatttgcggattattataattaagctttgcaattataaaacatgtgtaagcgctagcctagaaaagacaggaaggctgcgccgttgacatgcggaccccacatgtcaacctaaaggaccacggtagaccgagtacacagagacggtccacgggtcgacggaagcggaccccgtgtgtcaaccgaggcgagtggccaacaaacggactccactagacaccacacgggctgcacacgtagaaaccacgctgctaccgagcgggcacactaacacggtcaccacacgcacaagcgaacgactaccgacaccggtacacgggtactggggtcgacaaccgcacaacgggtacggggcgacaccgaaaggacgaggacggggcagcgagaggacggatccttaccaccacgcgacgaggcgtgggaacgacaacgacgaacgggcgcggcggagacagacgggcacaacggagacgaacgacgaggggacggcttcggcggcgatccttggacgaaggcgagacgcggccggcacgaggcttgacgacgcggagccgaggacgaagacgacgacggctacagcgaccttgacgaaacaccgaggacggacgagaacggctcggcggagggacgaacgccacgacgactgggagcgacgagaggacgacgacgacgacgaccggggccggcgaggaggcgacgagggacagccagcagcggctgcacggatgcgaggacggcgtggaacacgccgcagcgatgcccacgacggaggcggcgccgcgagacgacgaaccgggcgaccgacgggacgtcgacgacgagaacgaacggaggcgacgacgatggaccgcggaggggtttggatggaggggaagcgatgccgaggacgaccttgccgctgcgatgccagaggtggagacggcgacgtcggccggcgcactggcacggcggaaggggctgccggagtgggtgccgacgagaccgagggagaggcggcgcgagcgacggcgttccggcgaaaccgagggcaggccggggtggagggcgacgcggcgacgctgagggaggagatggcgcagccggcccgcacctgagcggcgcggcaggggcggctggaggcagtacagtggcggcaacgccactgttttgccggcgaggacacgtctccggtgatttccccacgaatcggaggcagcgccggcgaagaggaggcggctgcgacgccggggaaggcgacggcacggccgggcggcgctcggacgaggagggaaaggcggctggaggcggccggcggcacgggagagagaggaggacggcggggagaggtgatgcggccacggggaagctcgggaaggggctaaaacgagagaacgcacggagggggttccgttttataggggaggagagggagccggccacgggaggagcggggaacggcggcggagtttgtggccggcggccatggaaggtggccgaggttggcgcatccgttcccggcgattgggggcgccattcaagggggaattaagggggaaagagagaggagggaaaggggattaattccccctaattaatttggaaggaacggttggattcggggcggatttggaggaggaaacgagctagggttcgcacgggagagagagaagccgggcgggaggaaggagacgaccgggtgggtgggacccaccggtcgggcgcgcggcgtcaacgcgcgtgcggcgcgcgtgcgcacgcgggaggggagcggctcgggaggctgggtggggcggcttgggccgggcggcggcccaggcgggaggaggcgggagaaggtgggccgggaaggagaggagggaggggcggcccaggaggaggaggagaggagggagtgggctgcccgggaggggaagagaggcccgggagagagaggggaaagagagggaggagagggagactttgggctgggccgagagagagagggggaggactttgggccagacttggcccaaaggagggagagggatttatttttagtttttctttttagtaaactttgataattgtttttgttgcttaataattatttccggtgttctgaaaattcaagtaaaatttgagggctccttttagaccaaggagaatttaacaaaaattctccgcgccacattcgaatttttcttgtacgtattttagtgtttgccaatttcttttcgaattttaattaattctattattccttttagaaaatgaattttatttcggaatgaatttatcaggacgtgacaccaatccactcgacgcaggtcattagtaaatgcagcgactccatccacgtcgtcgtcgtagcgatccggtgaatggtggcgggcgtagcctcatgctgcacagcgctggttgattgtatcacggagatcgatggggcgcctacgaggtggggagcgaggccgttcaacttgacgctccctgtgtcgttcgggaggcgagtggacagatcgctcgttgtgacctctgctcctgcgattggatcctgcgccggcgatgctgaggcttggctggtgataatcttgagatcgaagatggggaactcggctgccagttggcgtgcggacgcttgcggagttaaccgggaccgaggcagtaatcatggtcttggtctggttcaagatgttgacgacgtgatcagcttggttgagcgcatcttccttgaggagggtgtcgaggagggtgatcgccgcaatcgcgttttgttgaggggtgtgaaagactgcagtcccctcaacgtcttgctgcccgataagttctcgcgctcatcgcccggcgtccaaggctcattttcgtcggtcctcggcctcctttgcagcccgttcacgttcttgttgttcacgctgcagccgttcttgctcttgtgcctggcactcctcttccagtcggcgtcgttcggcctcctgttgtacgcgtcgtccttctgcttctcgggcttggtgttgttcttccttctcgttattggccatgaagacgccgaaatagagaggggtgtagttatcttcaaagctttcgtcgaagtcgtcgaggtcgcggttgtcatagcggtagccgaattcatcatactctacgatctctgttggtcgtgagtcgacgccgggggagctgaagtagtcttccaattgatccgtcgaaaccgtgccgagtggctggagtatgacgccgacttccctggagctaggccggatcggtgctgaagccggatctggcctaggcctacggggagaagacgcccttgtagtaaagacagcagccagatcgtcggggagtttcatcaggattggcgggtaggccccatcgtcttgatctagtggtgttgaagtagatgggatctcatccgagtggtttgaacccgactcgatcgagataagcttggggtagatctcggccgagttcggaataccgaacgaggctgggacctagtctctccctaactggtttgaatccgagtcaaggagagaaatcttgccgaagtcgttggtgatgaagtcgaggctgccgaaccggaatgcctgcccgggagggaagacgaagtcgtcgatgctggagacggaacccatcgcacttaatcggcgaagaacttgacgctacccctacctggcgcgccaactgtcgaaacaagatttcggcaatactaaaagggggtggttatcaagctagaaaagtggatgggtttggagacaaggaattttatacaggttcagaccttcttaatcaagaagtaataccctactcctgtccggggattgatccgtcgagtgtattattgatcgtatgacctgggagaaaaatcgtgcccctagagggacccggacccctccttatataggggaaggagtccgtattacaagatacagtccatatccctaacggaatatgtaattatagataaaatacaatcgtaaccgactaggatctcggatatttccttgacatataagtctaaacctaacccgagtcctcataaagatattctatctatatatggtaccctgtaccctgtaccctgtcggactatatggggtatccataatctccacaagaagaaattagcatgagcacatcttggcgacatgtatttttgtaacaactagcagaagcagaccggtcactggtgatactatgaatcccattgcctaccattccctagagaattctgcagccatgtaagtgaatatacatgccatttaattcacagatgccatagatgcagatgttaactgcagacgggagtctggaagaccatcaccagggcatgcatgcagtaacaatgaagttctccatctaccatttacactttgtcattctaattcactaattttattatatatgcatataccactgtttggatgaaattgctttgtgtctggttcccgatgccttccctttttatcgggtgcctgtgctccacctgtgtccaacttttttttccccatttcctctctcccactcatcttgatgtgcattcctatctaaagtgaaacaatgccgctatgtggctgcctccgcccgtggtgtagggaggcgagggattgatgtcacccagggcagctactatagatggccaaatgggccgtttggtccagcccggcccaggcatggcccaactgactcgccgtgctatgctggcccgaaggcatgaccatcccaccatgccgcgtcatctggaggagaggtgagctgcggtgccgatgtggaggagccgaagcagccacctcccatggaggtgacggcagcaacgcgccacccgagcacggccgctctccggaagctacatctagtgaaggcgagctcaaggcagctagatccggcgagcttgcatccaaatctggtggtgaaggggacctcaccgtctgtcacgcccagaaatttgaataaaccaaaatatcatctatgaaaatcaccacaaacttatctagatattccatgaacacattattcatcaaattcatgaagaacacgggtgcattagtaagtccaaaagacatcactgtgcactcgaacaacccataacaagtcgtaaaagctgtcttaggaatatcttactctcgaatcctcaactgatggtaacctgatcgcaggtctatctttgaaaacacagttgctcctttcaactgatcaaacagatcatctatcctcggcaagggatacttattcttgattgtaacttcattgagtgctctgtaatcagcacacatcctcttagtcttgtctttcttctcaacaaaaattactggagcacccaaggcgacgtgcttggacgaatgtattctttctacaattgctcatcaacttgtttcttaacttctgccatttccttggctgccatcctgtacggtctcttatagatcggagctgtacctggtaccaaatcgatacgaaactctatatctctcttgggtggcatagtcgttaaatcctccggaaaaacttcaggatactcacagactacgggaatgttttccaacttctgaacatctttctcgacttcatcctgtttttcaccttccatttgattcaagactactcctttcttctgagtcattgggaactgaattattaccacttcccctttctcatcaaccaaggtgacagtgcaacttgcgcaatcaataactcctttatgccttgacaaccaatccattcctagtatgacatctaggtctttgcactccagaaggataagattggctaaaaaaggtgatccttggatttctatcatcatagagggacaaaaactaaccaatcttgtgctattacccggtgtattaactttcattggagcactaagttccacttttcttaacccatgtaccaccaacaaatttcttggatataaatgaatgtgtagcgctagaatcaaataatactgtagcaggaaataagttcacagggaacgtacccaaaaccacttctggtgctgcttgagcttcctccgtagatatgtgattgacacgagcttgaacgatcttgggcccattgcgctttggctttggacacttatcagcgaaatgcacgggttcattgcaattgaaacaaatgagaggctttcctcctgcttccttcttctgttgggtgggctacgaagcttgagactgtgccatcagcgggcgcggagctggattacggttgttctgatttccaccattgttgctcccactactgttctagccgaaatttcctggttggtagggcctgtgctgacaaacgatcatagtagtaggaccactatgctgtccggaactgaaactgggcttttgttgtccaccttgctgagttctaaactgtagattagataggtggatgaatggtaatggcaacaaccataacacggagagggattactgattactagtgatgcaacggcgacggcaggaggcggcggcaccagctagcggcggtgcgatagtaggcggcggcgcacggtggtggctagggtttgtgtaatatgaaaaataggagggtggaaggatttatataggagaaaaaaataaatagataggtgggtcctacaaggactcggattgggcggaggagagggagaggagtccaaataggacagggagggacttgggtttggccgtgagggggaggggcggaggggaaaaccgaataggattaggaccaaaaagggaaaagaggagaaaaatagatgaggtgcctgtcagggttatggataccacatacctaatagtagtcgactacatctcggcaggacccaccacataccatgtcctatacggaaacaaccttcggatataggaggagtttcgataaggaaaggcaaccagagttctacatggaaacgacaaggattactcggattgtatccatattggtttccctagttctacttggacaaggggacacctatgggtataaatacaagacccctaggaagagaggggggacgaaaaaacacaatcaacatacgcccaccataagccacaacatacaagccaacatacggcaagacaagtcgccggatatcgacatcagagatatgcttagatcaaccctatccggtaccttcagaggccggtcgtagggatctagcgttgtctctgatctcgcctggcacaagctcgaggaggaaggctaccctgttgtcgactatgagtcagacctacagaccgccatgtcgacaacagttagataggctaccccaaattttgtactggtgtgattatggtgaataaagagcaacatcggctccggccaacaggatgtagggttattacctgataactcaggggcctgaacctatataaaaatccctgtctccgtctcttttacctcaatctcgcgtatatcctagcaccaacgatccccatactgtccaaataccgtagtcgtgacatcaaacgttgacagtgccgttttaggaaaagaacggaaacggaaccggaaatggattcggactcggctcgttatacaaaatgaaactgtagacagagtgaggagtgaaccgggcacgattcacgactaaaggcgggaaagaaatatattattaattcaaatcctgacattttaaattaacaacattgctttcaatgctctgaatattccgctataaatcatgttaatgattttagagcaaagagaattcgaaaaaaattctccttgacatttctgattattaatcatattattaattagggtttacacatggttaaccaaagtaatttctaaagacaatttattgatgaattagaaactctgggaaaggagaaaactccgggtgtgacatcgttctcactaccgccgtggcccctctcgtcagtggagaggggagctcgctgtcctcgctcccatcgtggcccctctcgttggcgaagaggggagggagccagcttcaaatccagcgagctcacggcggagaggggaaggatcttgttggggaggaggcaaggtggacagggaggagggcaggaagtggggtggatgggaaggaggagaggaggccaagacgagcggcggaggtgctggtggcggcgtggagaagaggatcagtgcaaaaggccgtggcagggcagcacgttgtgcggaagaagaggcttaggcatgacctaatggtcgggccgggccggcatgggccttacaacaattgggttgtgttgtgcctggggcaggccgaatctccgtgtaatggtcggggcattgggctgcgaccttttggccaactatagctggctcggaggtcttcgaggaggctgggctacagcgcatgcgggcaacataagcgcatgcagttgcagcacccacatagaaaaatcgctatttttgccagaccttcgggtagacgggcagttaaccgaatggaaaaaaaatatgttttgactgcatgcagaaatgctttttgtagttgtggatgtgagtaaattttacttattattttagaacaaaacataaaagaaaattattttctctttagaacttcaaaacaaatttgataaataactttcaacaatatttcataaccaatatatttagtttgtgcttaaaatataaatatttataagagtaaagtgcacgggtggtccttaaacttgtaggggtgtgtcgacgggggatacccgtagaccggatatagagggtattggggtacgctgatacgaggatctacgtaatacgacatcaagcaaaataggaaacagggattatactggttcaggccccttggtaggtaatagccctaatccagttgatatgagattatatgatggaaacaacagattacaaagggagtagtggaactcgatgataccgacgagatcgtagtcgagttgattcgactagatcacccggtgacttggctcttgtaagctccggcttcgtaggctgtggtggatgtgttggctctgagattcgatgccttaggtcctcccggggggtcccttttataccataggtcaactggtctccaagtaggactcggagacatcggacccgatacgatacaatgacgacccagttctatccgagtaggactccttacatctgtgaactccataatggatttccccaacttatgctgaaaacgtccgcatacgcacaagcataccatgtcgatatgtgacgtatatcgaagggtagagggtatacctttcccgtagccctgacagtagcccccgacttctgcttaaatgaactcgtgaaaccgattacgacttctgatgtcgaagttgtcgtcgttctcagtgtgatgaccgagagacaaggagtgatcgacaacgccgggtaaagctcaatggtcatgagtgaatttaaatttaagtccgagaaactgccgcgcgtaacggacccagaaatttccggcagccatctctctcctttccttggaattcgcaccgtcggaggtgtgtctatttaagagagttttggggatccaatttgaggtccgcctgttgaaaaaactctccagcttccaaacgttcctcgtcttcaccgctcccacaagaaccctaactagttcatctcggttccttctctagcgatccccggcagcgatggatctcgacaagtctacctccaccagcgcgtcgctgaagaagctccaggcggatggcgctcttcccggtcgcgggaccatggagagagaagcaagaggtattgaaccccagcctgtcctgggtcgcatggttgcgattgaagactacattctctgtggttttcttcctccgccttctgaatttcttctcttggtcttgaatttctacggcctttctttgctccatttaagccccaactccatcgccttcctcagcattttttcgcatctttgtgaggcctatattggggtagagccgtttcttgacctttttcatttctactatgagttgcgctggatggaacccaacagggtatccaggtgtgtcggtttctgactccgggatggcatcaaattgcgctctatccccttccagtgtccttcttcccgtagcaaatggccggcgaggtggttctatcttcagatagaaaattcagatccactcttcgttgttcctaaggaacaaccaaacaagatttcgtcttggaccgcaaaacccgccttgaccccatctctccaagccttcatcgatatcattgatgaccttcgagtacgagggttgttggggtatgaagtcgctgccgactttattgatagacggatccagccgctccaggctcgacccatccagcctttcactattctggaccggaggacgcgacccgggttaatcctcggggtatttttcttgtatttaaactgacttgcttgtgtgcgcgttcctcctgacttatcgaattttggttctcaattcacaggtctgagcagcgaagccgtggggcgccgtgtcggccaattgatgatcagcggcccgacaacggcaagcaacgtccccgttcccctttgtgagaaggaggcggccgaacgcgacgctgccatcaatgtaagtgtacttagcggtccttctgcatttttcttccgggatcgccttatgacttcataaagcgtaggctcaacctctgattgatatcatcgggccgctcgtggaccacaaggtggcggcgtcgctgaaggagaagatcgccaaggaggcatccgatgctgctgctgccgctgccacaacgagtggcgtcgacgttccaaaaaaaggggaggaaattctcctctgtaatcggacatcgtcggaagccacccaccccctcggtaagttctcctgtcatttgatcacgtagtcgagaaacttccacctcacatcatatcgattgtactccaggcctcgaacgcgtctcccctgcctccgcgacggcagcggcttgtgacgctcagcgagaagtgagtgaatgaatttgaggtttcgtgatttcgtcgaactctgtctgaatcgcagcctttcatagggcggcgcgggcgagggcagcgcaagatgggtctggagggacctccagcgcgtctcctgccgtggcctcgacggatgtcgtggtcgtgcccaggagccacgaggcgacacctagcggcctagccaacgatctcgtggctggtcatggttcgccggctgccgtcctcacctgggaggagctccaggttgagatggggcgcctcctcgaggctggtgctcgcagcattggccgcgagatcgcagaggcgagaacggcggcggtgtcgtcggcgaacgagcgcgccgactggctagcgtacgatttggcggaggttcgtgaggacctcaagtagatgagggaactggtggccggcaatgagcaacaacggtaggggctagagcaccgtatgtcgaagctcgagaacaacttgtcggaaatccgtggctcgttgcaggtcacctatactggtctgcactagctcgccggggaatgcggtatcaagtctaccatcccggcaaatcccgatgagttctcgctgacgtcttctcttgcggagctggcggcgacgatggaggagatcccctccaagcatgcggccaggatcggaaaggagacgtccaacgggatctacacctaggcgtgccacgtccttgcgtgtgtgaggctggcgcaccctgaactcgatctgcggaagattttggatcagggggcagctagcgacgcgcgtaaggatgtgatggaagaagtcggcgatctgggggagtctgttctcccactttttgaggagtaggattttgactctcttgtactccttagacatgctgtataaaactctaattggttccaaccgcctttatgcgtgcagtcatcaccttagttttctttagcattttgatcttgagtactttgttgtcgtttgtagggatgttgatgtcgaggatgtccagtagcgcgggcagcctaagttgccagtgatcatcccagcacttgcgtttgagccacatgtgtcgccggacgatgtagatcagaatttacctgtggaaacagggatggcgacgacttccctaggttggtggtcttttcttctcctctgctcctccgacttgatctgctgtgttctcgaaagagaagagcagcttgacttagtcatttccatgctgaacagatctcgagagtgcgcttgctgaccaggatcgtcgtatccaatattggaagacgaaatttgaggtagcggaactcgagagaactatgctggaagtaaagaaggagcaggctgtggaaacacttcgaggtcgtgaggtgtggttcaactcgtacttgaagagttgttgcacgtccatggccagagtttgtagagagctccgagtaccccgtggggatcctgaggaatcggcggccggatatatctcgtggctgaatggcgcctgcacccagctcgaaggcatcgatcaacgcatcgatgaagccttgaagcaggagtgtcatcgctcaagccgatatgccggggggcatgtgttggcctgcatacgagatcatcgtccgcagcttcacctcgagttcctctgcgatgggttttctcattctcggagaactcctatggagatagatggcctggcgaagtcgatggcgccgctggcggagaaggttttccagtcgatggactggcgttggccttcctggtagtctccgtatcctgtgatagatgtctttggaaaaagtgtaatatagttttggatttttatggaattgtaagaaatacttgtggaatagaaaagaaatatatcttactaagctttcttactctggacgtagtgtgtatgagtgtcttctcacttcgcgacttcgaccagtcgtttgagctatacactctccctagcccctagccttgtcatcggagaattcttctcggaagataaggctcttagacctttgacctgcctcggttgaacaagcactgatcctagtccccagccgtgaagttggaaagtttatttccgattacacggcttggttaatacgcatggcgagaacacttacacgaccagatcttacatggacttttgtctctacaggatccgacaaggccttatcggctctgggcgtccccagccgaagttcccttaggttcctcggaggccttgtcaagacggcgtaaagggacatgaggataggttgcaacgctaggtgtcatctgggtaaggatcatcgggaaggaacactttgattgtagtctgtacctgaaaaataggctttattgaggctgtaagatgtcttacaagtatggatactattgatttatacatagaatttatgtagttgatcaatgttctaggaatttgccaactcgcgaccatcgccgtctgcgattttgaatgcgcctggccgtagaacttgattcatcgtgcacggtccttcccatttaggtgagagcttgttgcgtcctgcttggctttgaacccgtcgaaggacgtagtcgccgatcgaaagcgtgcgtgctcagatgcgcttctcgtggtgacggcaaagggcctattggtagctggctgctcgaacggcaactcgttcacgatgttcctctagtagattcacatcgtcgtatcgctgctcctcctgaccctcatcggaataattctgtactcgtgtactttgatgtcgtagctcggtggggagcatggcctctgagccatacacgaggaagaagtgtgtctccttgttggacgttgtcggtgtggtacgcacggcccatagtaccgatggaagttcctcgacccacttcttgtcgtgtaacatgagcctgtcgtagacacgggtcttgattccttgtagtactatgttgtttccccgctcgacttgtccattgctctgagggtgagaaaccgtggcgaagcagatcttgactcccagcctgatgcagtaatcctggaaatcggcactgatgaactgggagccgttgtctgttatgatacggtggggcaatccgaatctgcagaatatccctttgatgaatttgatggcgttgtcggccttgatttccgctgtgggtatcgcttcaatccacttggtgaatttgtcgatcgccacgaataggaacctgtagccgccctgtcctcgtgggaaaggcccgagtatatctagcccccagcacaagaacggccaagtgagagggatagtctggagtgcttgcgctggcagctttgtgtgtttactgtcgaattgacaagcttcacaccgctgaaccatgtcgcaggcatctgagggcggttggccagaaaaacccttatcggaaagcttttccgactaatgtcccaccggcggcatgtgacccacagatcccttcaattcatgtatgtcgaggaggaggtgtctgccgtcgtcggacgagacgcattttaggagtaccccgtttggtgccttcttgtatagatcattgccgatcatacagtagacttttgctttgcgggatattttctcagcttctgcgtcgtcctcgggcaactcttcgctgcttatgaatttaatgagtgaggtgcgccagtcgtccgtggtctcgatatcggcaacggcgcgctctgcctctgtagcccccgagctgatgtcgggggcgaccgggctatctttgccgcttgcctctttcactgatggcctcatcaggaagtccagaaaggtgccaggttcaagtggttctcgtctggacgcacgtcgtgctagatcatccggttcgatgttgtctttgcggtatacatgccggacctcgatctcatcaaaccttttctccagcttcctgacttctgcgagatacttggataactcggggttagaccatttataatctttgtgcacctggttcgcgactagttcggagtcccctttcacgatcaatcgcttgactccaagtgcagctacagctcttatcccggcgagtagtccttcgtactcggctgtgttattggttgccctgaagtttaggtggattgcatgcttgaattgatccccgcaaggtgatgtcaagatgaatcctgcccctgctccttggctgttgagtgcgccattgtccatgtttcgttgtcgattcggttgtctgatttgttatcgggcatagtccaatcaactacgaagtcggcgaatacctgggacttgatggctgtttgtggcacaaagtggacatcaaactagcttagctcgactacccatttcgcaatgcggccgacaacgtctttgtttctcacgacttcaccgagagggaaggaggagacaactgtgactctgtgggcttggaagtagtggcgtagctttctcgatgtcatgattaccgcgtagagcagcttttgcatttgtggatatcttgtctttgcgtcgtggagagcttcgctaacgtagtagactggtcgttgtactttttctctctcgacaacaatgacggtgctaacggaatatggtgtggcggcaatatagaggaataattcttcattaggttggggagcaacaagtacaggtggatttgataggtagcgcttgagtgcaatgaatgcctcttcggcctcctgtgtccatacgaatttgtcttgctttttaagcagagcgaagaaaggttgtcctcgttctcccatcctagcgacgaacctgcttagtgccgccatgcatccgtttagcttttgtacttccttgagttttgtgggcaacttcatgttctcgattgccttgatcttctcgggatttgcttctattcctctgccagagacgaggaaaccgagcagcttgcccgacggtactccgaacgtgcacttctctggattgagcatgaggcgatattgtcggaggttgtcgaacgtttcccgcagatcgtcaatcaatgagttgcttgtcttagtcttgacaacaatgtcgtcgacgtaggcctcgacattatttccaagctggtcgctaagtgcaccctgtaccgtgcgctggaaagtattccctgcggttattagtctgaacggcatcttaacgtagcaaaataccccgaacggcgtgatgaatgttgtcttctcctcatcctcttttgccatgctgatttggtgggaaccggagtaagcgtcgaggaagctcaacaactcgcaaccggctgttgagtccaccaattggtctattcgagggagaggaaagtgatccttggggcacgccttgttgaggtcggtgaaatcgacatacattctccacttcccgttggccttccgtaccatgactgggttggcaagccactctggatggagtacctctctgatgaaaccggctttgagaagtttgtcgagctcttctcgtatggcttgttttcgatctggtgcaaatctccacagtttttgctttactggcttggcatcgggtcgcaccatgagtttgtgctcaatcaccaacctgggtacccccggcatgtcggacggctgccaagcgaacacgtcagcattgtcgcggaggaaggtgatgagcgcgagttcctatttctcgcctagtgatgccccgattttgacggtcttgtcagggttggcactagagagtgggacggtcttgatcgcgccgttcggtttcggcgtcttgtttgttttgctcacttttttgggtggctcagtcgtggcgggtgggctaggcgtgtgctcgaccatgtcgaggctccgcttgtcgcattgtactgccagctttgcgttcccttgaatagtgattgttcccttcggttccggcatcttgagcacttgatacgcgtagtgagatgcggccatgaacttcgctagtgcagttctcccgatgatggcattatatgctgtatcaaattcagcgacatcaaaggtgatctgcaacatgatcttgcccaatggtttggacgaagactggggagtgattccatggaagggttgatcggtgggtgtcaactcgcttcgtgggattcccatcgcgtccaaggcgctggcgaagagaaggttgattgagctgccactgtcgatgagaactcgtgtgaccttgatattacgaatagtgggttcgaccacgatcggatatcgccctgggatgacagcagtcttagggtggtcctcttctgagaattctatcttctgctcggaccacttcatcttgggtgcagctccctgccacgtcgaacagacttcacgttccagtttcttgtattctcgctttgagcagtacgctgtagagcctccgaaaatgtgtgagacatggagatcggagtctgggtatgctgagtccgattcctgagtagccgcctccgcatccttctcgaccacgcgtactctcttgcctttttccaatgccatgtgcttctcgagcgactttttgaaaacaaggcaatcttccaaagaatgtctgtccgtcttgtgtatagggcaccatgctttcttcgcgtcgctactttgtgggtctgggcgcttgggagggttcgcgtattctgctgtgagaacttccgcttgaactttccttttcccactcttgcgatttttcttcttgcttgactcaggtgcgtccttggctggtttcttctcttctccggtcttcattttgtcgttcttgcgtcttagtgcgtcatccgcataagcgcatcggtcgacaattttgaataatctctgagtagtcgtgatgcgcctcgttgccaactcctgagtagtatagcgatctctgacaccggatttgaaagcgcgaattacagaagcgtctgtgatctcggggattgtgtttttgcacctgttaaagcgccgaacataatccctcaacgattcgccagagttctgtgtcaacgcatgtaggtcgtcttcaatcgcgtggcgcttgtaagttccttggaaattggctacgaattgctgccacaagtctgcccacgaagagatcgagtaggggggagatgcatcagccatgaacgtacagagcctttcaatgcggttggcaagtaatgtacagagcctttcaatgcggttggcaagtaattcaccaatgcgttgtcgtccgctccggtagcgtagagtaccgtggagtaatcctgaaggaactcttccgggtcggtgctcccatcgtatttctctattgctccaggtcagaatctttcaggccatcggacatcccgaagtgaacgaccgaaggctccacacccagcgctaggagcggtgggttgtcggcgatcatacatccttcgtggatgtctatttgatgatgaagataacgaggatgatgacaatgacgatgggtcacttggttccggcgtacgattacgaggacgtcggccgggttctcgagaatcctgtcatcgcctcccgttgttgtctcggcgccgatctccatcatcatcgtcattgtggtgacgtcctcgaccagtatcgcccagcacccgccgttcgcgatcatcgtgattgtggcggttgtggcggttatcatggtctcggtcttcgctcgaacggcctcctcgatcttcgttatcgtgacgctgtgaagagacatgacgctgggaacggttctcattgtctcatgtgcgttgtgcctctcgacggccattcaggtgatcgcggagatcgccggtgccgcgaggtggaggggtggctcgatgaggcgattctcgccgttcagggttttcaccattagcatcgccagttggtggctgttctgggtgcgctgcggcagtggcctcttcgaacgtgttgctgaggttcgtcactgattcccgtagtcgttctgtccaatgtgcgagatcgtcgttcagaacgggatcgtagagggtttccctcagtattgcgttgatggctctgatgtgctgggccggagtagtcacttgattccccgcttccgcattggtgtgcgctgacgtgccaacatcgtcaatagccaatacctcacgcggcgtgctcgttgtcgatgatccatagtcttcgagcaggtgcaagactgatggttcatagggatcgatgtcgattaccccaacaaatcgatccgaaattggcgtcgctccttgttccttgtctttatccctgatggggatgtgtgactgctggaccttaggagatgttgtcttcatggcgctgagaaaaaccttgcagctcgagaggtcgtgattctttgtcttgtgaataggacaatagacatcacgagttggagaggtacgctgaattccacgctctttgcaggcacgaatttcagcatggacattgagaaagacccaataggcttgcagggtgtgtttcctggttttgtggataggacaccaggaccttgtcatctcggaagtaaccctcatcggctcatgattcctgtcggaaagacaaggcttggccacactaggatccttctcgggttcggatgtcgtcgatgttccgatctccgcttcggcaggaggatccttcgacatggagtcgccctgggttgcagccactgcgttctcgtttccggccattggcggaccagctgaaatcggcattgtggtgtaaaccgaaaagacgatttcaccgacttgagtccacaccagtgttgttggaataggaactccttggttgaggttggtgttgacgctgttgtcgacgaagctagatgtcatagtagtagaaccttgagcaccaagtccccctacctggcgcgccactgtcgacgggggatacccgtagaccggatatagagggtattggggtacgctgatacgaggatctacgtaatacgatatcaagcaaaataggaaacagggattatactggttcaggccctttggtaggtaatagccctaatccagttgatatgagattatatgatggaaaccacatattacaaagggagtagtggaactcgatgataccgacgagatcgtagtcgagttgattcgactagatcacccggcgacttggctcctgtaagctccggcttcgtaggctgtggtggatgtgttggctctgagattcgatgccttaggtcctcccggggggtcccttttgtaccataggtcaactggtctccaagtagaacttggagacatcggacccgatacgatacaatgacgacccagttctatccgagtaggactccttacatctgtaaactccgtaatggatttccctaacttatgcccaaaatgtccgcatacgcgcaagcataccatgtcgatatgtgacgtatatcgaagggtagagggtatacctttcccgtaaccctgacagggtgtgttatctaggtccccaaactctcaaaatgcatatttaggtcccaaatcgacacaacccttctaggatcctacatggcgctgatgtggcatgccacatggacatgacgtgtccttttttcttcttcttttatttttctttttcgttttcattttcttctcattcttctgctcgggtcacagaggaaggagaagaaaggaaaaaacaagagaagaaaaaagaaaaaaaatgaaatttttaaacgggtagcatttgtcaatcaaaattatgccatgtcatgtccgtgtgacatgacatatcagcgccacgtaggatcctgaagggaccgtggcgatttgggacctagatgacacaccataacaagttcagggacttggatatgcattttgagagtttagggacctagatgacacacccctacaagtttaaggaccgcccgtgcactttactctatttataattaaggtatagctacagctatagcaataattaatctgtaatacacggattggcgattaatgtgtgtttaatcgacgaaggtgtggtgagttgaagacatggggtgcattaaaattaagaagaattgtttacaatttcctaggaatcttttcgaccaatggatattgtttcaattgagttaaaataagagtaggtgcaataaggtttgaaagcgcgccggtgataaaaatgtcacgttggcttggatggtgagctggcgcagtgagaagatgaaagagaggacaagccgatgactaaatagttgccgggctgcacgtgcactgcaagagaagtgggtccgctgctgtgtactccagaagctgataatcgcagccattggtcaataaaaggtaaaggaagagacagaatatgataattaaagaataaaatagtatcactataaactgatgggcaaatatgttcctatttatttaattatttaagctagctactccgtccatagccagatgtaggtagaggcacttattaagccataaacacaattttcctatctgtaattcagttcatgcaggttgagcgagctaaatttctagaaaaaatacatcttatagctagttttctgcaaaatttacttgtgccttagcttttctagaaattcgtcacatggagttgttttgatattcatcgctggataaccactcacatgaattggatgatgtctccctgtgcatgacttggactcaaaacagttaatattcatctattttctcctccatcatgtcataataatgatcatgaaaggatgcagtgttcacgcagatcacatagtttgcaactgacactaccctctactggcacagtcgtgcaatgccaatcgtctggacacatttacggaagggatcttgtgcaagcacaagtttataagtggcattttgtcttcctggtacctaccattcccttaccatgttttctctgtactcctctcacacataatctaagctaagctgttgatttgcaaaggagatttccagaatcagtcaagctagcaatacaagtccgtaccgtacccatatatatatgtgcaaccgctcttctctgtcagacatgttggcgtgtgatatatcttggcatatgatacctaaggctttcccaaggcctatagccaccattggtgagtgagaaaagggctatatatcaaaagctgtgtctcatttggtttcgaaactatagttgcgagtatgattaatccaacttctctcaaagggccttaggaggtaggagtaacatgcatgtgtaccatgctattcactcatctatactgcacatatatataaggacgatatgttttattgactcagcaatatatgtgtatttccgtactgaatcactggagagatcacatctctgacgctaggtcaacaacaaaaatgtagtgttgaacctgcatgatctatatacatgcatgcccctgaaaaaaattcattttattttctttagcattatcatgcatttcaaaaaagtatctagtatgaggcctctagcatagttcgagtgacccactaagcattttaacttttgagcgtgacgcatcattgcttgatcaaacaaaaaggagttgattcttgcattaacctgttttgtgagagtcaaagtgccatatacctcactaaagatcaaatgttccatgagaggacaaagcatattgatatcaagtaccattatgttcgcgatgtagtcgcacaaggtaagctaaatgtatacaagataagcactcatgataatcatgctgatatgataacaaagtcagttcctattgttaagtttgagttttgctcaagcttagttggtataatggtttagtccaagaggctatttggtgccaaaagtgttttctttgttgtgttcagggtgaatgtttgatttatgctacgagaaggaatttgtcttaaggtggagtttgttgagttgtgatccaaattcatttatacacatataaaggctaacttcggacggagcgaagcagaggcccgtcgccggaggcttgggccccgtggaatggatcgttatgcttttagggtttcacctttatagatatacatggacggacacagtatagggacatgggggtacagctgtacccccaaaatttttgcaaaaagaacactacatattatggtgtattacatatgtgtactaataattgggttaaaagggttatatttgcacttagattgacattccagtccagttaatctcaaccctccctactccataggctatatatatacacctgtcgatggctagctgagatgacaactggccaacaaaaaaatcatacgatatattatgaatatttttgtttgtggagcgttcaaataatcaaaatcgatgaaaatattagtttgtcgaaccttcaaaactctatcgacttgcccaagggctatttaaattttgtaccacaaatattgcaattgattattctatacaaataaattaagaaatatcgcgaacataaaaaaaaacttgaataattgcctggttacattcttaagaaacaactttttctatatgttcgcgacaaagacataatatcctatttccaaaaaaagttctgatcaattataactttaattttgtttaattttagtaatttactatacactaaaatcactttacttttaactatgttcatgttagttcttttttacataggccttcatcatttatgttgagcgatattttcttttaacttcgtacctccatcactgaaatcctgcgtccgccactgccgatatagtgaagatatttgctggctagcacacatggtttttcctctcctgctttatgatggttttccacgttaaatctcatttcttctgtgattgatctatcattatttatcatttatttgccgatcgtttcctaacaactggcacagtcgtgcaatgcccatcgcctggacacatccatggaagagatattgtatgagcacaagtttataagtggcaatttgtctttctggtacctaccattcccttaccatgttttctctatactcctctctcacataatctaagcttacctgttaatttgcagaggagatttccagaatcagtcaagcaatgcaagctacgtatccacatacatgtgcaaccgctcttctctgttagacttatcttggcgtgtgacatatcttggcatgcatatgatacctaaggcctataaccacaattggtgagtgagaaaagggctaatatcaaaagctgtgtctcctttggtttcgaaactagttacgagtattgtaggatcgaaacacaagaactaagccaaccagaggggggtgaatggttggtatacccaaaaaacgaaaacttttagcggaaataaaagttaccctcgaaatcgatggatcgcgtctgaccgaagtagttgcaccggtctgaccgcctgatgaacgtaggtctgactgatgtagatcgatcggtcgaaccgccgagaacgcctgccgccgactcctgtcgccgccggtctgaccgccgtgtgcccgccggtcggaccgccgcgatgccgccggtctgaccgccggtgcgtcgccggttagaccgccgaaacccggtgaaacacaaatcgaagaactcgtaaagtagatcacaactttattacttctctctgtgtttacaaagtgcaccaacagcactccttacaaaaatttcgactaaactcgaaaccctaattcaaaactcaactcaattgctctctaaagcgataccgggaagcctcatgctccccctctatttatacatgaggtaggcagcctaaagccacgaaccaaactcatactaggagtcctaaacaccttaggaaaccctctagtacaagaaagaaactttacataaccaaacataccaaatttggactccttccaaattcaactccgcatcccatacgcacacaataactccatcgtatgccatatggaatctccatcaaccacgtgcatcaactctagcctaagtatcccgcatgatctctgaccactacggacgtcgtcttatccccaagccgactcccggtccatcaccgcaaatactctcccgagacatcgagtcacctacacatggaacaaacaaagaaaccatattccgagaccaagctatcttcaacttgactcattagcagcaaacaatagtattacatacgtatagtatccatctagaagtcataatcatgaaataaactcggatatccaaataaacaacccgaaaccgaaaccgacacagtgtcggccggtcagaccgtgggctggccggtccgaccgctcgatcaccgccggtctgaccggcatacacagcccggtctgaccagtcacataaaatcacagcagtatcctgtaaattcacctgtgaaatctaatcatctccaaaaccacttcgtgaataaattccaaataacaaaaccaataatctccaatgcctgattgttcatcataaaataataatcaaaaacacctttgattttacaagtatgatatatccaacttctctcaaaggaccttaatatatataggaggtaggagtaacatacatgttactctactgacggtatgtatgggttgtgtaatggtgtacaatgctattcactcatctatactgcacatatataaggatgatatgttttattgactcctattatcagcagttaagatgcatattaatttccgtactgaatcaccactggagaaatcacatctctgacgctagctcaacaataaaaatgtagtgctgaaccagcatgatctacatgcccctgaaaaaaaaactcctttcattttctttagcattatcatgcatttcaaaaagtatgtagtatgagcagactccggcataattcgagtgtcccactaagcattttaacttttgagtgtaacgcatcattgcttgatcaaacaaaaaggagttcaatccaatacaacatgccaacacagtacaaaattgaaaccctagttcaattttttactgtgtcacgaggaactcgagagaaagtcaagcaggagcgtctctttctcgatccattgcaagtccctaatgaacaaattaatagtgaatcacttaatcatcctaggttgatctttgctctcaaattcatcattcatgctcatcttcacagtgcttacttcaaccttagctcgatgtacctcacagcctggccttcataggcgaatgcattgctcaatttatttgtctgtaaattccacgacgaggggtcctataatcctcatgtttatatatggtgggctatgtgcctaaatacaaccctaatacagttcaggtaggttgagcgagctagatatttctagtaacttttaaaagcatcctgaacacaagcccaccaaattttcatgtaccttagcatttctagaaattcgcctcatgaagaggttatgttttaacattcagctctggataatcatcatatgaattggatgatgtcactcactacccttgtactgtgcataactttaactaaagacaacagcttctctattttctcctccaatatttagcacacctcatgtcactcactacccttgtactgtgcatgactttaactaaagacaatagcttctacattaattaatcatggaaggatgaatcaagtctgtcctctattgtgtactgacatcaggtgtgctatgccttcctgagtcatgcccacctcccgaatctcgctacaggtgagttctagtatgagcacaagtttgtatgtggcattttatcttcctggtcccttccattctcataccattttttttttgtctgtactccttttctcacacaatctaattagcgtgctattaatttacaaagtttcagaatcagtcaaagctaccaatatgtcaaccgcatttctctatcttacatgcatgcacctatcttggtgtgtgatacctatagcccaaacatctgggcgtgtgatacctgtagccataagagtaaaacgggctatcaaagttctgtctctttggtttcaaacctatatttgactcttatatacactagtacaggaatgattttcctggacgggactcattttagattgcaaacaaacttgcaagtagtcgcgtctgcaaaactcgagctccattttcgcgtgtggctctttaaaataaccgcacgggaaaaccaattttcgcgtacagacctgttaagagacctgcacacgaaaatacccacccacatttttaatgtcacgtcgccgcccatcccactcccatgtcctcccatctccctcgactccagctccctcgtcctcccacctcaacttctccctcgactcccatctccctcctcccccctcctcttccccctcctcccatctcccaatcccgacgacaacggcggccttgggtagggcggtggaggctgcggcggagcggacccatcaccggccaccgtggggaggccgaatccgtcgcctgccaccacggggaggctggatccatcgcctgccaccgcggggacgacgatggtgggcctcgggcaaggcggcgatgacgacggtggtgacggtggcgatgccggtggtgaaggcgtgacagcggcggcggtcgctggattagggttcattttttttgtttcgattttttattttcccgtgcgggcggcttaagcgcccctacgcggaaatcgtgatttttgcagacacctcgttccagacgggtggaatatccgcacggaaaaattgttactgtactagtgacttctctctaaggacaatagatttgacacttttttcccttggtcagtaatatattgcacccttcactactaaaaatggtttttgttttggtgttacatatttttctctcaggtggataaaataaaaaacgctagtgaaaatataaccagggttccctggttagtaactgcttgtaaaagtcaatttttacaagcggccgtcctaaagtagccgctcgtgaaaatagccctatttttacatgtagacgtttaagagaggcacatgtgaaaataaattttgaagaaaataagttctcttagacaacaaccataaaaaatacacgttgaagaggccgacatgaaaaaagaatatatagaaagttccatcttcccccggtccccacttgctctctccttcctccctatcctcacctcacctcaactcaccttcctccctcacctcacttcagctcctccaacccctctctctctctctctctctctctctctctctctgatctgacacctccctcacctttccctctctcgatttcgatggtggtggtggcggccggtggcggcggcttttggcggcaacaaaggggtggtggtgacgaaatcgaggacatggatccgaggcagatccagcctagccgcctccatttcctcttcctaatctagccgaatggaggaggctggcagcggcaaaggggtgatggcggtggtggtcaacagcagtaaaagggtggtggcggtggccaaggggccagatcacacggtggaagaaggggagcagcggtggaggccgcagcagcggagacgtttgatgacatggatccgagccggcggcagtgacggtggaggggaggaggtggcccgccatgctcgagaccactagatccacctccgcgatggcgaaggagatgggcggtggcggtggaggaggtggatctagcagtggcggtgcaaaggaccaatgggtccgcttccacgatggcgaatgtgaggggcagcgacgaaggaggaggtggatccaacggcgacggttctcggtgacagccacgagggttgtgaagaggactcagtgacaccatgacggtgatgagggcttctagcgagttcgtacatggcttggggtgtcttgtcaatggcggattggcggtggtgttggaggaggcggatccaccaatgacaccaatttctggattttctggatctgccggagctagggttcctggggtttttggatttttttttcacataaaatctataacactggaggctggcttaacctcaacacattaaaaatcaattttcacaagcggtcggcttaacctagctgtgtgcaaaaatcaatttttactggtgttgaaggcccgcccatgaagatggtagattttcacttgccttcaatcgcaggcaggactctcggccgtttgcaaaatgttgttttgatcaccattgatttttccttttggtagtagtgctttcgctccagtttttaacacttgtaggtgccaaataacaagtcgacacatatttaagagagtttctccaccgattgtatatgagtttgtactggtgtaccatgctatttcattgatcgatacgactatgtgcgcatggagtgatttttaacattcatctctggataactactgacatgaattggatgacgtattcctctctacacatttgtgcacgacttcagactcaagactgttaattcatctattttcttctccaaacatgtcatagtgatcatgaaaggagatgcatatatattggtcatgcagatcggttagcttacatctgagactaccctttactgacacgagggacacaatgcccctctcctgaatctctttatggtagaaatcctgtaggagcacaagtttataagtggtatttcgtcttcctggtacctttcattcccataccaagttttctctgtactccttttctcacataatatatatctaaggttagttgttaatttgcaaatgaagtttccagaatcagtcaagcaatatatacaaggcacaagctacgtacgtactcacatatgtcaaccgctctactctgtcatacatatagccagcaaaagggctaattcacaagccttcacggggaaatttaactatttgccactcttgtgacatggcaattaacgatttgccacaccgtatctatgacatatgcgccctcatgtgtctatgacatgtgggcctagtggcaaattgttaagcaccactcgtaagagtggcaaatagttaaaagccctgcgttcacgcgcactgaactagcgtaaagaccccaagcttttcttttctggcacggtatttttccttttctactaagtatgtacaccaaaaatttatatgttgaaaattgatgtattgaaagtttatgtttctgattccaattcgaatcaatgtttgttgtgtacaaaatttctatatgtaaggtttcaatgtataaaatttttggtaggctaatgcaccgtgcacgtgggccagactgatgtaattccccattagaactatcttctagttatcggtgcgagtttctcacatgctgataaatgaaaaattatattgtaccaaccccactactataaggacgcttctgaaaatagttcgagtaacacatcattgcttgatcaaacttttaatgtatatgtaggcattttttttccctgaaaagggcacaacaggtcccccggttcaaactttatttatttttaagaaagaatacaagcctaaattacaaccctaatacagctatctaggccgagcgagctagatatttctagtaacctttaaaagcatattgaataaaagcccaccaaatttgcaagtaccatagctttcgtggaattcaccgcatggagaggttatgttttaacattcagctcttgataatcatcatatgaattggatgatgtcactcgctacccttgtgcgtgacttcaactcaagacaacagctcatctattttgtcatccaatatgtgtcatacaaattaatcatgaaaggatgatactggtcacacagagatcttagatcagctagcttgcacgactaccctctactgtgtactgagtacagtgacatgagctaagcttttccctcatgagtcatgcccatctcctgaatctcgctgtaggtgagttctagtatgatcacaagtttgtatgtagcattttgtcttcctggtacctaccattctcataccatttatttttatctgtactctctttttttcacacaatctaattaactagctgttaatttacaaaggaagtttatagaatcagtcaaagctactcatatgtcaaccgcacttctctatcttacatgcatgcacatactatcttggtgtgatacctatggccaaatatttggacgtgtgatacctgtagccacaagagcgagtgagaaaagggccatcaaagttatgtgtctgtttgatttcaaacctagattcaactaggattataggtttgacactctaattttttttctcttggtcagttatatatttgtacccttctttcagtctagtttttcacatgtctaggtgacaaataatgaagtgttgattatgttagaataattgggctaggcccaacttataatattaaatctcaaaggcccataataaatgttgaggataataataccacctctggatttaagcgagaaatatctcaacctaaatagggagttattagaggctcctgttgaccagttgaggtgggggtcggaatgccacacgcgcgcgcgcgcgcgccgggccgtgggcgtgggcgaggcgtggctggcgtgcgtgcgtcacgtcgctatccttttgcagccactaacccacgttcccacgattccctccttttgcagccactaacccacgttcccacgattccctccgcaacagcgcgtccacgttctttctcctgatagataaggaggccgcgagtccgatccgagttcctcgcttctttcccggtgttagtttctccttctccgcgcctgagttgctctcgcttccccgcttctgatctcttgcgcgcacgagagattggaagaagcagtgcctccgaaaccacaccttcgcctgagatctgcaccgggtaggcgggtgatcaggtttttggggagtgcctcctgcacgactgctcatcgccatgtctggagttgctaccgccgctattggcggaggtggtgcgccgccaccgacaggagctgcgccgccgccgacgccgacaggagctggatccggagctggtgcgccaggaggaggtgctgtgaacgactacaacaacggaggcaattctgcctcaccatccagcggagggccattctcggggtataatcttctccttctactgctgttagcgctactcctgttcccattgttagcgctatactgtgtgcgctatgttcttgttcctgttctacatgatgcctctagcatgttatcgcattactggtatgttcctgtttctgacattcatgatgtgcatagtatgctactggttatgttaagatcaccctacactgcttatgccatgatcatagtttcaatttcttggattaaaatatgccgaataatgactatattttcaacaatccaaaaacctgataggtcattttcggtagttggctttgctgctgcactgaaaccacatgcttttgatggttcaaactataagaaatggaaagcacgtgcactattgtggttgacagcgatgcagtgcttctatgtttcacggggtaaacgaagtgaaccacctctttctcctgaggaagaggctaagttcgaggcttcggattgcctgttccgtggagcattgatcagtgtactcgctgacaacatagtggacgtgtacatgcacatgccttctgggaaggacatgtgggatgcacttgaggccaagttcggagtttctgacgccggcagtgagctgtatgtcatggagcagttctatgactacaagatggtcgatgaccgttctgtagtagaacaagctcatgagattcagatgctggctaaggaacttgagaacaacaactgtgagttgccggacaagtttgtggcgggtggcattattgccaaactaccaccttcttggtcggactttgccacttctctaaagcacaagagacaagagttcagtgttcctgatctcattggctctttgggtgttgaggagaaggcgagggcaaaggacgtccggggcaaaaaggttgagggaggttctagtgccaatatggtacagaagaagaaccctcatgcatcccacaacaacaagaaagtcaagcctgatgtcaaacccaaggctgcaaccaattttaagaagaaaggcaagggaaaggcaaagggagactgctttgtgtgtggcaagtctgggcattgggccaaggactgtcctgagcgcaaagacaggaagtctgccaacatgatcattagcgagggcggaggaacatcggggtacggtaaaatattacctacagttctctctgtttttcattcacctgattggtgggtggatactggtgctaatattcatgtatgtgctgacatttctctgttttcttcttatcaggtcgggagaggttcctccttgttgatgggaaacgggtcgcttgcggctgttcatggtgttggtacggtcgatctgaagtttacttcgggaaagaccgtgcagctgaagaacgtgcagcatgtcccttcaataaagaagaatctagttagcggctctctattgtgtagagaaggttttagacttgtgtttgagtccaataaatgtgtcatatctaaatatgggacttttgttggaaaaggttatgacagcggaggcttgttccgcttttctttgaatgacatgtgtaataatcataacgctgtgaaccatattagcgagaatgatgagtctaatgtgtggcattcgcgactctgtcatgtgaatttcggttgtatgatgcgcttagctaacatgagtttaattccaaaattcactttggtcaaaggttccaagtgccatacttgtgttcaatcgaaacaacctcgcaagcctcacaaggcatctgaggcgaggaatttggcacctctagaacttgttcattccgatttgtgcgaaatgaacggcgtgttgactaaagggggaaagaaatatttcatgacactgatagatgattgcactagattttgctatgtgtatctattgaaaacaaaggatgaggcattgcattactttaaaatctataaagctgaggtagaaaaccaacttgaaaggaaaatcaaacggttgaggtctgatagaggtggggagtatttttccaatgagtttgcatccttttgcaaagagtttggaattattcatgagatgacgcctccctattcaccccaatcaaatggggtggccgaaagaaagaaccgtactctaactgagatggtgaatgccatgttagacactgcgaggctttccaaggaatggtggggtgaggcagttttgactgcgtgtcatgtcctgaataaaattccaatgaagcacaaggaagtaacaccattcgatgaatgggaaaggaagaaattaaatctctcatacctatgaacatggggctgtttggccaaggtaaatgtacctatagtcaaaaagcggaaacttggaccaaaaactgttgattgtgtgtttcttggttatgctatccacagtgtgggttatagattcttaatagtaaactctggagtacccgacatgcatgctggtacaatttttgagtccagagatgctactttctttgagaatgaatttcctatgaaatatacatctagcacttctagtaaagaaactgtcatgccccatgagcactttgcaccgatagaacacaatgatcaaacgcctgaggaaaatcctgaggaggacaacattgtagatactcgcaagagtaagagacaaagggttgcaaaatcctttggagatgactacattgtatacctcgtggatgacaccccaagaaccatagaagaggcatattcatctcctgacgctgactactggaaggaagcagtacgcagtgaaatggactcgattatgtctaatggtacttgggaagtcgttgagcgtccatatggatgtaagcccgtaggatgcaaatgggttttcaagaaaaagcttaggcctgatggtacaatcgaaaagtataaggcaaggcttgtggccaagggttatacccaaaaggaaggcgaggatttcttcgacacatattcaccagttgctcgcttgactacgattcgagtactacttgctctggcagcctctcatggtcttcttgtccatcagatggacgttaagacagctttcctaaacggagagctggaggaggagatctatatggatcaaccagacgggtatgtactagaaggtcaggagggaatggtgtgtaaactattgaaatccttgtatggcctcaagcaagcacctaagcaatggcatgagaagtttgacaccacgcttacatctgcaggctttgttgtgaacgaagctgacaaatgtgtatactatcgctatggtgggggagaaggggtgatcttatgcttgtatgtcgatgacatactgatctttgggaccagccttaatgtgattgaggaggtcaaagactatctgtccaagagttttgaaatgaaggatttgggagaggctgatgttattcttaacatcaaactacaaagaggagatgagggtgggatcacacttgtgcaatcccactatgtggacaaggttttgagtcgctttggatatagtgactgtaagccagctcctactccttatgatcccagcgtgctattaaggaaaaaccgaagaatagcaagggatcaactgagatactctcaaatcattggttcattgatgtacttggctagcgcaacgaggcctgacatctcatttgctgtaagcaagctgagccggtttgtctcaaatccgggagatgatcattggcaggctctggaaagagtaatgcgctatctaaagggcactatgagctatggaattcactataccgggtatccaaaagtactagaaggatatagtgactcaaactggatatctgatgctgatgagataaaagccacaagtggatatgcgttcacacttggaggtggcgctgtttcctggaagtcttgcaagcagaccatcttaacgaggtcaacaatggaagcagaacttacagcactagatactgcgacagttgaggctgagtggcttcgtgaactcctgatggatttgccggtggttgaaaaaccagtgccagctatcctaatgaactgcgataatcaaacagtgattattaaagtgaacagttcaaaggacaacatgaagtcatctagacacatcaagagaagactgaaatctgtcagaaagcagaaaaactccggagtgatagcattgtactatgtccaaacggctagaaatctggcagatcagtttaccaaggggctaccacgtaatgtgatagacagtgcatcgagggaaatgggcttgatacccacctaaggttgcataatagtggaaacctgtccattgtgatcggagatcccgtgaatttggatggtgaaacaaactattgtgtgactgagagaagagacccttgaaaggggctcattttcatgatgtgcttctcttctttcctgcatggtaggatggcttatgtcttaatgtgatccgagtggcttttccaagcagagatgttgacctgcagaacatctcagaaggaacacacctatatgagttcgactgctagtcacagtctatgaggttttggcaatctctagatactcatgaaaggcctggagtttgacttatatgctccaaacagaggggatgcgaacggcagcccagtaccagtcaaggttctgagtgaaacctgatcacacaaaacttacaattcaaggcatagtccattgttcagttgtggtctgatgtagctcatttcctaggtggaagttcaacttaacagtctccaccaaaaccctggtatatcaaacaggcacagccttgagaacatttcttatgagccttgaaatttggtggggattgttagaataattgggctaggcccaacttataatattaaatctcaaaggcccataataaatgttgaggataataataccatctctggatttaagcgagaaatatctcaacctaaatagggagttattagaggctccctgttgaccagttgaggtgggggtcggaatgccacacgcgcgcgcgcgcgccgggccgggccgtgggcgtggcgtggctggctggcggcgtgcgtgcgtcacgtcacgtcacgtcgctatccttttgcagccactaacccacgttcccacgattccctccgcaacagcgcgtccacgttctttctcctgatagataaggaggccgcgagtccgatccgagttcctcgcttctttcccggtgttagtttctccttctccgcgcctgagttgctctcgcttccccgcttctgatctcttgcgcgcacgagagattggaagaagcagtgcctccaaaaccacaccttcgcctgagatctgcaccgggtaggcgggtgatcaggtttttggggagtgcctcctgcacgactgctcatcgccatgtctggagttgctgccgccgctattggcggaggtggtgcgccgccgccgacgccgacaggagctggatccggagctggtgcgccaggaggaggtgctgtgaacgactacaacaacggaggcaattctgcctcaccatccagcggagggccattctcggggtataatcttctccttctactgctgttagcgctactcctgttcccattgttagcgctatactgtgtgcgctatgttcttgttcctgttctacatgatgcctctagcatgttatcgcattactggtatgttcctgtttctgacattcatgatgcgcatagtatgctactggttatgttaagatcaccctacactgcttatgccatgatcatagtttcaatttcttggattaaaatatgctgaataatgactatatttccaacagattagtggtaggagtaacatgtgtcgacacatatttaagagttctctaccgatagtatatgagtttgtactggtacgtgtaccatgctatttctttcatctatacaactatagtgcacatatataaggatatgctgtattgactctcctatgctcagcaatatgcacatttctgtactgtcatcgcattgaatcactagagagaacaacggtgatgctagctcagcaataaaaacgtagaattgaacctccatgatccacatgcccacgacaaattcctttcattttcattagcactatcatgcattaaagtacgtactatgagccagcccagcgcagtttgagtgacccactaagcactttaatattgagtgtaggcacatcattgtgcttgatcaaacattctgaagtagagggtaacttttggaaggaatggttcaaaatcctgatgcctaccattcatatgccgattatataattgaagacttggcatgtaattaagaactatctgtattggaagggccaaaatatggtggataacaaagtttctatttcgatggttttagagtcccatttatgtatttattcaaattagctagtccatccacaatcaaatgtaggtagagacactactaattaaaaaactattttcggcgacacccctctagctatttgtgcgaacggtcaataacaaaacataccagtaaaaatgcatggggggttctcagtcacgaaatgcatgtgaaaataacaaatcaaaattgagccaaaacagctccgttacgtatataatgacgatacatatctagaccagtaagtaacctgaatccttattattatggatcaataataccagatttcaaatttgtgttccaatctcacagaaaatttgaacttctagggagttaaaaaacaattgccctggcagtaataaggacatccaagtttcgagaagaatgctacagttccacaaaaatttgtgaatttatctttgctttttctccttttccttctcctctaactccctgttccgttctcttcctccgtgctctctggctatccctgtcagcagcagtaacaggcagcatacaacaaaagcagaaccacacacacgagaaaaacattagcaaaattacagatcaaaaactagcgaagagcaaccatgcaccagcagcagccagcagcagactgcaatggcagcggtagactgactggctctcgatctccatttcctatattttctctattggttagtactggtaatgtagatctaaagacccaaattaatttactcgattgttgtgacttcggccgcaaatgtgtagtccatttcttaggtttaatgggctgcacgtatccacgatatccaattatccatttgagcaatggattaaaagatgagttttctcacgccactcttttctattatttttagcacttagttgaagcgttaggcattaccagcgttgacgaatatctatcaagttacagaatagaagtatgaattcataaaacaggtgtgagcaccctactatgtgcaagaactcttgcatcccctcgatctaggtcagattgaaaccctggtgtgtaagaaaaaaaatctagaatgcgcaggagagttatgcatcactatattataagaagagagaggagtctagaaagaatcgtaaagcccttaagggctagggttaaacacagaaaccaaacaaaattttatggaaaaaactaattatatccttggcccttgcatacaccataatttggcctcatccctaatactacctccgtcccagaaaatgagtcgttctacatctccaacaatatcccacaaaaaatgtcgttacagtggagaacttgattagaaaagtataggctatctgtccattctatcaagtcatctgccaatgagtgttcaaagaattcattaattaattgtatgtagggattcttggtaacctgttgagtgtatgatgacttattgaaatgacaactcaattaaataaataggggtaatttagtcattacaataagaagctaatttggttaacaaatctcagaacgtcaagaatttcgggacggaggaagtatcttgcataagaacattggtaatatgagaggtccctttaaagacgcaaccttttttttatgtttccaaatctaccaagtcactaggacaatcaaagagttaaacccctagtgatgttgcttatcaattaatatactgcaaagcttggcatcaccactaaataaaagtaagaaaaaaaaaaacttaccatgccatagctagaacaaagctttgtggccagatactatgtatcaagcatgcgcaaggaggagttggcagggctaacgataaaccgaagaaaatggtgcaagatcctgatacctaccattcatatgacgatgagatattgaagacttaataagcatgtacgaactatctgtactgccattcctttgctatagcagatgcatccctctgccattttattgtagtagttggatgtaacaagggttataacgaagctctacgcactatatgtatatatattatcagcctgctttgctctgcactgtagtactatttcattcatcttttgatgtggtagtactatttcattcatcttttgatgtggtaaaagtataattgttaattttgtatcatctgattactatttaggtaaaaaaaaattagaagaatattcggcaccatcaaatcgcacatgcccaagccactcattcttataatcattatgatttgcgatagagattttgtgaattggctaaagacctacactcagattctcagctgtactctgacttaaacttttcctggacgagctacagtggtctgaaaaactaaacagaccaaagaactagcgaacagaataagcagaggatttttatcctggcaacaaagattacttcatcgagccatatagagtaatgagtgcatattatttaaccccatactactcatgtaatcccttcaactcacaattgtagtcctcatacctcgcatgctcagagatgagtctccatatatccaccatccagagttctgaaaatcttagcactaatatctgtctgccaaccttgctttctcaacattcatttttctttggaagctaggggaacaacaggttacccgttatccaacgtgtaaccactgcagcataagctctctcaatactgcctcacacatcggattgcttgtctacagctgactttctcttggtcagtactgtactcactgttagaagaaataagcatgaacacatcctagcaaagtgtattcttggaacttccaacaaaatagtgctactatgaatcccaatacctaccattccctactaaaattatcaagagactttggccatgtaggtaaatatataggccatttcacatgcacagtgtgactagtaattgtggataggtggaggactgttcaccagtgtactcagtcgcaatgaagttctccatgtgtcatttgcagtctaaaaaaactctgctattttctaatttattaattttatattacttgtgcatactactgaagttctgagttttaaagtcctccgttgaataaaaacagatgaggacttttaaggtgtctgcaaggtacctaaaggtactaaaggtacggcaacgcaaaccgttaatgaagagaagggcaaggtcaagataggaattgaaactattgtaatcggtggcagtggagtaataatctaaataaataataggttttattgtaacgttgttataaactaaaagggacattaagtttgggccgagatatgttgtccttgcttggaaaattgaatacatttgtcgtagaataattacttttcaggcttgttcgattaatccccaccaatttttgttcagtccccttggaaaaaggattaaccgaacaagacctcgaggaattcctattatgttattgtggaatggttctcattgtttcagtttttttctcttcattatagtgtgactatagcaaaataaaaagatgacattatatcaaaatgcccatctgtaaccgagtaaaatagattttccttcatgtggtgttagagccccttactttaatcatttaaattagagtaaagtgcacagtcgatccctaaacttatgttgtattatctcggtctccaaactctcaaaatacatattcaggttcaaggacttgtcaaagtgtgtcattccaatcccaaattaccttagcccctttaagatcctagtggtgttgagtgacataccacacggacactgacgtggcatattcaatcatacaccgactgaagtgaggcctactcaatttgttttcttttttttttctcccttttcttttttatttcattttctcttcttcttccatcatactccgaggctccatttgtcagtgtagagttagtgatgacatgtcaacacccatgtggcatgccacattagcgccatataagatctcaaggactctggcaatttgggaaaggaatgaccaaatgacatgctttgacaagttctcgaaactaaatatgcattttgagagtttggcaacccagacgacataaccacataagtatagagaccagcattgtattctttaaattaattagtgggtccacaattaaatttagctaggagtgcataattcatgagcctattaaaccataaaggtagttttttttaggaaaaaaattctttagtttcatatgtacgttgagccagatttgtaacctttaaaatcatctcgaacacaatacaagcataccaaatttacatgtacatttccagtgaattcaacatgtggctattgaaacattcaattcaacttgctaggatgagtattacatgatgatatcactcgcctccgatatgctacaatcatgaaaggatatatcttctccctttgttcatcacacctcaaggatatatagctagctagctagctaagatgctctttgttcctctcaccttgagggtatatagctgtgagctctttattccattttattgaaggtagatatatgcaaaaatataagtaacaacaatataacactaagcgctctatggctatgtgttcagaaaagactgcatgagctttcttatttagtaccatgtgttttatattattctccttattgaattaccagatagccaactaaaaattgaaacaaaatactagccataatccaacaatttatttgtattgtttgaatggatctcttcttaatttcctaatagaacaaaacaatgcactatggttttggccaatgtagcattcaaagttgtcatgagaaatttgaaagttctcatatgtactatcagacatattgaatgatatctctcccacttttcatctccatcttaatctaccatattttatatacgatccaatagttctcatatatatcgttgatgctaagaatgaaggatgaaacaccataaaaaatgtgcgacatagccgatgatcaaactaccttggtattctcatgctttagttgctaaaaatatcatttcacttgagtagcaaaaaagagggaaaaaaacttccatggtcagacaacaacattgatgtaagtctaataaagcaaaagataataaataagtagttacaaagagaaaggcacgtattagaatgagattatagtcttcatcaaaggcattgaacagagcttataaataaactaagctaccttacgtagagcataggaaaacataagaagcacgacacatgcgacaccaggatgttctaatgcttcaatagctcaaaaaatattatttcacttgagtagcaaaaaggaagaagagaaaccatgtgaccaaacaacattgatacaagtctaatacataacagcaaaactaaaataagtagtgacaaaaataaatatacaaaagtccagcttcagctccacctctcctagagctggagcacagccaaacagtttcagttccacctaaaatgggagcggagctgggtggaacgctctgacaaaataaactagagaggtggagctcggtttaggctgctctacaactccactccagacccaactcctaaagctaaatttataagttgaaactctactaaataaatcctatactataacgagattatagaccctatactacaacgagattatagtcaccatcagtggcactaaacaaagcttctacatgtcctattctatcagtggattgggcatggaaaacaaggaggcttatccatccatcacaggtgctagcaaacatcatcatggactcatggtcattattgggtcttgccaacctgtgaatcagtctgtgacctgcaagtggtttttttctcttcctctttttattttccccccaaacacacacacagcaagtggtttttcctcttgtttttttaagcagtttttcttttgacgcaagtggttctctctatcaggagaagacagcagctagcagctagcagctagctagctaatcgaccctgctaagctaagctaagctaagcacgggaatctgattatctcaacaacaaacaataataatcaatcaaatccccatcacaaaaacaaaaaaaaaaataaaggaaaaaaaaaacactcgagaagttcttctcctcctcctctttccccttcctctcgccgccccaaatcacccgcccaccaaaaccctcgccgcggcctccgccgccgcgggattccggccaccaccagcagccgccgcggccaccggggcgccctcctcctcctgccccccggcaccggcgaccgaccatccccttgccccctttccccgtcgggttgtgaggcgagatgagggagctgcgcgtcgccgtcctcatcatcgcggtctcgctgccgtccttctccgcgtccgaccgccaaggtaccttagctttttgctgctctccgaccccagtcgcctcgcctgcgacgccccccggttgtctcctccgagcttctgtgtagtgtagtgtagtgtagtgcagtactgtagcttcaattttcgcatggtagattaccgaacgccttgtggattacatgccgtggcacactgtcgcgatggtagcgaagtaggtaaccagatgccatgtggaattgctgtattgatttccaacgctacagaccttaggttaccttcaattgataatacatagcacaccttgcagtaggtactactgctcgctttcgttttgatagcttggaactactgcttttggtcaaaacttgccttaaatgtgaacgtactgctagttgcttagtccaaacaaagggaaaagaaggcgccaacatgctaactaatgcttcgttggctgacgtggtcgcctgcgcaccagtctaaatctaaaggtttatccaaaaatagcatggatttgaaaatgctgcatattttgagatattaagaaattgcggaaagtaggcacatgttttctcaaaactttagaactgtcaaggtttttatcctgaaatgactgtttttgtttatatcgatggcttcactgcagcattaatgttatgtgataattgcatttttggaattgtgtctgggaaatacatgtggtggatgcaacaatacatattacactctttgaatccccatatgttatatagtgagaatattctttatttgccctacaagttagtaacttaccttatttgctcctatgaatgttcccctgttgaccacttaaactcagtttatgccccttattattgaccctcccaccaccctcctgtaactgttctgtgaactatgatggaacatgtcaattttgcccttcttccccctcaatcccttcattgccatcttatatatcttcattggacggcatttccccatcttgtcttctgctggtaccgtggacgggaggctaattggccaaagaagagggaggcagcggagaaacagagatcatcaaagctgtccgtctcatgcaaatctgccatccacaccattcgtcgagctcatgacaccattttttcactgggccactggagctcatgacaccatgactgtccttccatggcctaccgcctttgttgagattacgacagttttgtggccctacctagtctttcccaagctcacagcatccatggctggtgtcatcagatcttgccacagacactgctctgtctttcaccaatctcttgactgccacagccctcttgccataaacaaaaatgtgatttgctgcaatttacagattacagagagagttatagagaagattagatcaacatggaaatcaggcctatacggaaaccatgggatctatctattctaaattcctaaccatttttcccctaatagtggaaatcaagtaaaatgcaagtgccctgattgttgccggatggaagaaatcggacgggagagagaaaaaagtgagagtgaaaaggaaaaggtgaggaaggaaaagaagaaactgacagtggccgggatcaggggtacagctgctatatgagcaaaatagtgagaagaatattcgattaactgtatagcatactaacagaatgtaactggaaggggaaaagaggagtgaaagttgagttggcaaatgagggattatagtttctgtaaggggaaatgaaaagaattttctctacagagtgaaaacacgggcaacaatattcatattagatgcccctatcatgcgagcttattattacttgaaaatttattcctcatttttatgagtggcgaatctttggttggcactaactttggtgtaatcctgaggtattaagttagttgatgaacatagagtaacttgttatttatcctctggttctcaaaaaccttttgtatgttttaccaggagatgccttatatgatatgaaacaaaaactgaatgttactggcaatcagctttcggattggaaccaaaatcaagtcaacccttgtacatggaattctgtaatttgtgacaataacaacaatgttattcaagtgtaagttggagctcatgcaccttctcatcttgtacacttaaattttatactgattcccacctctgctctttgtcctgtttgttttcattttttatgataatgctttcctacagaacattggctgctcgtggatttgctggagttttgtcaccaagaattggagaactgaaatatttgactgtcctgtgagtacattattctattatgtagattaataatacttgggaattcaatatatgagtgttcaataaatggttatgaagttggtaggaaaaccacaatctatactaaattaagagaaaaatattttctcaatacttgaaagtatttctgtaatttgaaaaatataaataggtggcatgagtaattccaacaagtttgtgctgaccccagaaactgttgttaatattgctttcagttcctctatttaatccctttttaaaaggcaaacactaaggtagaaccctactggaaaatcattggatcaaaataaaataaatatgcaataaaaaagttaaaaaaatcaagaagtccaagcacccaactctgcaagatctgcacaaaatcttaaggtcaattctatggagttctgttcctggtagtttttctcctgtgctttcttgttgattggggttaactgtagtttcatgacaggtctgagtttaactgattttttcagtataaaagatcaatttcttctaaccagtaaccataaaaccatttttaactgagagaaatgcattgtaccaatgttacaactgctaattcttgattttggaaggtggtgtgagtatgtttttgtgtcctgcatgaactgatggttaggttaagtgcaatatgattctcctgtcgattctctccaactattatgaaatgctgttgtgtatgatcttgcaggtccttggctggtaataggatttccggtggcataccagagcaatttggtaatctttctagtttgacaagcttagatttagaagacaaccttttggtgggagaaataccagcttctcttggccagctttctaagctccagttgttgtaagtatatctgcatttcatcattctcttcttttggtgcatacaatcaaaatgattcatcatttttcatgctttctgtcctttttgtcacctgaccaggatacttagtgataataatttcaatggatcaattcctgacagtctagcaaaaatctcaagcttgactgacatgtaagagtatacatcttggctaagtatgatctcttttttaaaatttctgtttctgctaacactagttcatcttccatttgttgacaaacaactttttttttatggcagccggctggcgtacaataatctgtctggtcagatacctggtccgttattccaagtagcacgttacaagtatgtcaagatctctctaaaaacagtttaatccaattttttttaaaaacctgagtgactgatgaaggttcaattttcatgaatagcttttctggtaatcacttaaattgtggaaccaacttcccccactcttgctcaaccaacatgtcctaccagagtaggttaaatcctcattagtttatttatatatttactgatacggagtttgtctcctagaaaagatgtcaccttataattctgtactatttcttaattgttctagaatttttcatattacaggtggatcccatagctcaaaaattggcatagtacttggaacagttggaggagtaataggacttctcattgtagctgctctctttctgttctgtaaagggaggaggaaaagccatctgcgggaagtttttgtggatgtagcaggtatttgttttcatgttcttgtagttgatttgtttttagtacctgcatctatcatcagtttttgtggttgtggcaggttacttcttttgtggctttgtggttaggtttattagttcctgcataattatttctcttgctaatgtctcctggttacacaaatgctacatgttcttgtgtaaattgtaacttatccgcatgatcaaagccgatgatcgtaagctatgtcctcaatcaaccaaaacaagcaggtgcacctatttgtgacctcagtttgataagtgtgtgatttatgccttaatctttttttctaaatagaacatgtgaaggtatctctgtgatttatacctagcttcatgtttgcttgacagtgtgcattgaatgaagtaatgtaaaaaaattgtgattcacaggtgaggatgatcgacgaattgcatttggccagctcaagagatttgcatggcgagaactacaaatcgcgacggataatttcagtgaaagaaatgttctcgggcagggaggttttggtaaagtttacaaaggtgttcttccagatggtactaagattgctgtaaaacgattgactgattatgaaagtcctggtggtgaggccgccttcttgcgtgaggtggagctgattagtgttgcagttcaccgcaatcttctaaaattgattggcttctgcacaacacaaacagagcgcctcctggtatatccattcatgcagaatttgagtgttgcctaccgattgcgaggtatcaatatcgtacttctccatccctaatgccctattgccttataaagtttgcttaaatgtgctgctattattatttggagtatctgtgaacagaattttgtcatttgcttaatttacggttacagatggtgggcattgagtttttcagtttaatattttaaataaacctcaagtcatgcactcatgtggttgatttgtattttctatagacttgaaaattgataaaattaatttaacctttatagttatttggtgtgagcttcatggcatattgtttgttgtgttgaaatcgatgcagattttaagcctggagaacctgtcttaaactggccagaaagaaaacgggtggccattggtacagcacgtggactagaatatctgcatgaacactgcaacccaaagatcatacaccgtgatgtcaaagcggcgaatgtcttgcttgatgaggactttgaacctgttgttggtgattttggactagcgaagctagtggatgtgcagaagacatctgtcactactcaagtccgtggaacaatgggtcacatagcacctgaatatctatccacagggaagtcatcagagagaactgatgtttttggctacgggatcatgcttcttgagcttgtgactggccagcgtgccattgacttctcacgcttggaggaagaggacgatgttctattgctcgatcatgtaaggcttatttactctaccactattaaccactctaccatgttccttgggaaattttggaaactgtgtccttacatggtgcttgttctccttttaggtaaagaagctacaaagagaagggcagctaggatccattgtggaccgcaacctgaaccagaattatgacgacgaggaagttgagatgatgatacagatagcattgctgtgcacacagtcatcgcccgaggatcggccatccatgtcagaggtggttcggatgctagaaggcgaggggctggcggagcggtgggaggagtggcagcaggtggaggtgacaaggaggcaggagtacgagcggatgcagcggcggttcgactggggagaggactctgtctacaaccaggaagcaatagagttgtctggaggtagatgacaagggccgtgacaacagacatcaaacaaacggcgtaagccgaatctgtactttttctgtaatggatgtagcgttgttctttgtagagtagatagaattgtcctggaacaacagcgtaagcgatagctggtaaatgatacaatcggatggataatgatatgatagaaaaataaagttgtatgtgtttggttgggcatggctgaaccttagcagttgtgtgctccccatgcactgttatcaaatcggccgattagtcgtaaagtcggtcaaattagttgactaaagagccatgactctgaccaaattagtcgtaaagtcggttgtaaattagtcgtgattattgtagcaaatcaccaattcaccgtgctaattggcttattgtgtttagtactttagttttatttcttgctgacttattgtcttgctttgctactccatagtccatagtttatactgtatacatttcttagcacagtacaatagtagtaaagattttatattgcattccttttttttttttgcatgaccaagtcgtggactagtcgacaagtcagtccagggatatctcaactcgactttacgacttgacaaccatgtccccatgtatgtgcgtgttattcatttgatgttgtaagctgattattagtcttcccttgtgataacccagcgttaggtctcctttgaaacgcagtggaattttgcaagattttgacaagaaattagttctattccaattggaatcaagaaaaaagatcacttatccttttctaaatggggccttattgttaacttgttccagaacagctgcgaaaatctgtacattttttcaatttcgtcaactggaaacaatttgcatgattgctgtcaagctcccttgatctaatgtattgtgaagatgaaaatgtttactcctattttgtatgttttgcttagtttcaagggaactccgtttctggctcaaaattagtgtcctgttgtcgcgagtggcctcgcattgttcttcatggtggtacctttttttttttgcggggaagagggaatatattactcaatcataatgttctcccccattaaatgcgagataaaattacaattttcccccaaccaaaacccagagaaggattcagctctagccttatttgccagataatggctgataatattctgactaatacaaattttattaacagagataaccctctccccagcctagagcaggtttgcttcatgaatgatgtttgcaagctcgaaacgatctctttctatgcactacagaagctggaccaccgaggcgcaatcagtcttcacctggagtgggagcattgtccactggattgccagattaagcccttcaacgcaagcacgcagttctgactccaagggactattgcatctttcgagtgatctacaggaggtgaaaatgatattaccagtgctatctctaagaatcatacctcttacccgaagcagcatcaaaggatccatccacatttaacttcatccaaccattttttggtctctcccagcaaggttgtggagtgcttggatttctgctttttaatcttgcattgcaggtagcggtacactgttggaaatggaacatttgcattctttgtttgttttcatcttatctcatggtggattttctttgtgtaaactagccactcttgttccatctaatctttcattgttgcccaacgaaacaggatataaatcacataagatcttaacatatagatatgctcatggatgaattggctgaaattgttttttttactagaaattggctcaaattgtccatggatagagatagatcacaatttgtatgggctctgctcacaacggtttcttcctcgaaactgaacaagattaattgaatgccatcgaacggcataagaaacccttttgttacatttgtataaaccgatgtgatagtggaaggggtacttttgagttttattttaaaaatcctaaacagaagggagaaggcttgaagtgatatactagcaagtaggaagtccaaagagatatagcaagtacgaagttcccccccttggaacaagacccctcagcggcagtagattctacactcttggaaactgcgttgaactgtcggtcatacacatcatagaatttgtcaactaaatactattgaacaaatgtgttttgttatcctggtgcctaccattcccatataaactagttaattctatatatctccttattcacttaatccttattcacttaatccttaactcactaaactcaagtactcaactgaataaaaactatgtaaatatgtctaacaatctcttctttcatactgatcattgctaaaaaaaaacaagataagagatatgtatatgctatttctaggtgctccgtctatgttttactagttgagtaaggtatgacgccaaccattccctttatgatgctctattcaaatatctagaatctggctgtgtttagctcccttcaaacttccaaaaattccgtcacattaaatgctttgatacatgaatggagcattatatgtggacaaaaaaaccaattgcacagtttgcatgtaaattacgagacgaatcttttgagcctaattacgctatgatttggcaatgttgtgctacaataaacatttgctaatagcggattaattaggtttaatagattcgtctcgcagtttacaggcggaatctgtaaattgttttgttattagtctacgtttaatacttcaaatgtgtgtccgtatacgttaaaaaaaaatttaggcatgcaactaaacacggcctctattcctatccaaaaggccatgctgctagctagctacctctacactcaacaaataatctcatttcgcagttcgcacttgccacgaacaatatgtactatttcgactttaatggtagtttacaaaactcaaatataatatatagatatatgtagttttttcctaataaaaaattatatagaataaatgtcgactttcctcactcgattgatgatcactcacgatgaactcgctcgggatgaccacagaatgaacaaagacgaagagaaacagagttctagagctgtagaatcgctgcagctttttgctttactcattatgaatttaaagatgaatcgagaggtaccatgaacccactatgttctcccttgcatattgtgccatggttgacaatgcatgtcatcccacacatccaagattgtggcacatgacacacacatggcttctctctgtgcatagttcagcgcgagctcaaccaaaataccgaaaataggggagcttaaaaaaaagggaactaaagcaaacaaattaataaaaaccagaggatttgtcactaaaatcttcaatggcaaaaacttaaattagcaccgcaatccatttcacatcagcataatttgcctcatcaattcttgatatattgtttgctatgtcatcaaaatgagcccacatctccagccccttcccttatctctctctttataaccacgtgaggtaaactgaggaaatgataatattgcagacataatactgaaaaaccatccatgaaaccagctttaattggtcttgattttgcactggtttcgcttgttggggcaacagtttatttcgcatggtgaaattcagattaattaatgcatgtactttttccccttctaaggcctatagaggccagaataatgaaaatccattatctaaaaaaaaaacctacagcaggccatctcaaccttgcattatttagaacattattgcaataattgacataaataggtaattttcaatctttgacttgccctttacataattagattttcttgttatcacttttccatcattggattctgaagatgatgtgtaaactactcctatgttatagcaaaaaaaaaaaagatgttgacatgtagctatttcttttcctcctcaagcacatgaaccttggtattgcatgatggtcaggaaaacaatcaaaacttaatgcttgatactgcttgatcaaaccatgaacttattgatctacaataggacattaatttaaacaccaaacatctacacttgctaaaaattgaaacccttctatttcatacttattacaaagacacatccatgttcttattcacccagaaagtcctcgatcatctagagtgacactattcttttttttagcactttaaattttaattagtgacaataaacaaacattgcaataatgtttttctatggtccatcatgtacccctattataaactgctaaaacatttgaaaaccaccactcaaaaacatgacactgccgtggattatcctgattacctgatacctaccatttccatgctgatatagtctaaaattattaattccttttccacttatcatctctgatttttttacgagagtattaaaaaacataaactatcacaagctcttgagagaaactatactatacatataccaacacctattcgctaaaaacattctatttcgtcttctttcttctcttcctttcagtatagacaagagacgctatttaaatagctggaaaatgttgtatgcagaaagagttatgacgagtaaagatgtctaccagctctttctactattttcccttattctaagacaaagtatattgtttattgattatcacaatatttgaaagcttttctatggtacatgaaagaaaatatgcagttttatattaatttgtaccttttctactgacaatgtcaccttaggcaaacatttaaaaaaaatcatattactccgaacacattttatttatgcacctttttttttttgcaaagaaccatgtaaacaaaatgccttctgctaatgggggtttgcaggttgttgttgggttggtggtttgtacttcattttatatcaatgcaatgagaaaagagcttctgggcttctggctctgtttcaagaaagaaaaataaagaaagctttttgcttctcttatcgatctagccttggagtatgaattcactgtgtgcctaccgctaccatgttggctcattgaatatatctgctctacttttttaaatggcatttcttactgctcttttttatatctcataggtaagagattatctatatatagaaattttacgtgggtgtaaccaatggtaattggaggcagatgtgattaagatcttaagtttcttataaccaatacaagtgacagaagttttttactctgcatcaacgatctattgtgctgaactactgattcatccctttacagattaattaatctgatttactgattcagcgaataccttcttttttttttcctatcgtgctcctgccaaatcaatggttaaatttaattgatacctcattgtaccttatatatagtaccttcttaagaatgagaaaagagctcttacctctatattattgtacagattaagaaccaagtcatgtgtttcattgtttttgaggtaaaaacacatacggctatcacgaacaattccacttaagtgttctaattagctgtaatacatactttctcggcctaactgaaccataatggttgagaacttgttgttatatccgcgaccaggtataccatagtcaaaattacagaagacgaagttaagatgtacatgaactttatgtacagctacatcgcaaacccaacaaatttacaggttatactatatggaacaagcaaaagtatgcgacaacaacgaggcaagcttctgagacacccatgagtttaatgttgcctttggctacgtactgatcagcatgatcttcattcatttggtgacatggtaaaagtgcaggtttatcattcgatctgatctgctactccctcatttatttttttttatttttatggatatatacggccattgagatagggaacttagccccgcaaacaacccaatctgaaattcgctccataggagatttgaactcagaaccttagggtactactcaggtcactgtaaccactagactacatgccctttcgttatctgctactccctcataagcttcctgtaaaataactcctcctacacatcaatagctaaagggagaggtgcttgagctgttggtgtttgctatgtcatcctggtacctaccatttcccattcgtgtcctatataaatcctctcttagttaaacttgtatttttcactctctcatcccacagggtggagaactcaaaagatggtgaggaagaagaactcatactcacacatgctctatttatacttttatagtagctgctggatgcagtcagtaaacaaacaaatgtggcaactaaggatatgtggttactttttttctctaccagcaaaatactcgtacgtttgttatggaattttaacaaaacatatcggcacattgcaaacaaaaaaatctattttaaattttagagcttaattgatttgacaattaattacaggtttttatctttctatattttaggcgtaaaaaattgcaagcaatttctttcaggaatttaaattctaactagggctgataagccctccatacattgcaccagtgtgccactgtcttcaggccatcacggctcacttcaatctgctaaaatattttagaaccaccatgtgaccaagtcacgttgtcatatactatatatcctgacatttccacacagatgcaatctgaaattattcatttattatttatttatttactaaccttgaattttgtttacgagaaaatatgaaaatatcataaagagctagctgataaggcaagctatagtactatacatccaacgcctattattcatgaacaacattttatttcatttttttttaatcttcctgtcagtgtagacaagagatgctgaaatgtgttaagaaactacgggtgatgtcatccacccaaggaaataggaacaacggttcctaatctaaccggtagagaagaggagatcgctcctctctctccctttggcgtccctctcgacaaccgacgcgatgttcccaaacatcgcgtcccctgcggttgacaccgcttcacattgtataaatgtactgttgccgccccctcctaccttttgctgccgggccggatgggccggcccagcacccctcgcttcccccctagcctgctggcctgtgccacacggtggtgggccgaattcttttaatttcggcccaccacccaatttatcatttaattttagttttaatttttaatttagcagcaattttattttagtccctgtgttttatataatttagtcaaaatagttcatcagttgtacaaacaattatgtaatggtcctatagaccattgatgttatgtgtttattaacataggttgtcttaataacatgccttttgcatattatttcaagacacgctctactttctcgctttattaatttacaaaattctataaattttgtactttgatttagaaaattctcttaattatgtacaacataattaatggaggaattaatgcatgttccacttcacaatttaacttggaaattaatcacatgttgatgaagtcctatactttggtcatcgtgaccataacttaggcagcgagtatctcgcccatcatcaagtggtctacattttgagatgattacccgatggagtcctacaaattggccgcactggtcataacctaggcaacgaacatctcgcccatctcacagaggtctacatctcacgatgattatccacatgtgttactttccgagaatatgttttgaaaaatgagattatttgaaattttgttgagcacaaggtagtggagtcctaaacattggctgcggtatattcaccagaatatatttgtctggagaccgtgttttaggcagcaagtatagcttgaccactattaagagatctactccactatttaattacttggagattatccacattgtgccacctaatttcgaattctaactcaaattgccaggtctattacctgcatcttttcgaaacattacaaaatatgaagtcttacatttcgcattgagattacaaccttaatatcatgtttttattaatttacctatgtaaattgataatgttaaccatgattgtagggacatggcaacaaaagagttcgacgaactcgccctcgatgggactaactatcccatctgggcttttgatatcaaaatcaattttgcctctcagggggttttaaatacaattgaggaacccaatgatggggacccgccaattgagaacaggaagttaaatacaaccattttacttctaaggctctacattcacaaggatctcaaacatgaatacatgttagagacgagccctctcaacctttggaaagctctaaaagagcgttatgatcagcaaaaggaactcatttggcctgaggctaattatgagtgggttcatttacgcctacaggactttaaaactgtggcagaatacaaccatgctgttcataacatttgttccaggttgaagttttgcgaacaagagccaacggaggtagagaagatagagaaaactgtatcaactatgcttctggaggataggatactgactcaacagtatcgcgctaacaatttccagaaccattctctgcttatacatacattgactcaggcagaaagacaccatgagctttctttaaagaatgcccaacagcacccaccgggctctgctccactgcctgaggtgcactacaatgtacaaaatatgctgagaataagaaaggattcaagggaaattcttcgaataatcctaagaatctgactggaaagcgcaaacgcaacaacaacaggtgcaaattcaagggtcgaaagaaaggaaaagggaagggtaaggcaccacaacctcgtagcaatggcaacaagcattgctaacaggtgtggatctgacactcatgtcgttaaagactgccgcatcctgaaacatcttgttctcttgtaccaaaaatccctcaaggacaaaaaatcttctgagaacccaaaatttgaagcccacttcaatcttacacatgaagagcgactgaggttgcaagttctcaccaggctcctgttgaaccaaaaagcaacctcaatgttctcccagaagatgtcactccactctctgcgatggatgatatgttcatcgaatactgctcaacggacccacttggagatttgcaataatctcggtgcgtcccacttggacatggagctgctcttatctcagtgtgcttgaaacagtatattgatatcctataagtttgccaaacaatattggttgtacgaactcccttatattgtaaggttgtatggcttgctagtcattagagtatgtacttttaacatatgtaaacgtcatactatgtatttgatgttttaattattgtatgtatgtgtttatattggataaagaattcttaatcaagcaattcttctttcattatagatgtctaaggatatcgctctattggtcatcatttgatcactgataaatttcccaaatcctctgattttgtatgcactgcatgtgctactgggaagctgattttgagaccatcttatctcaaaattagagccgaaccacttaaattccttgaacgcattcaaggagatatctgtggccctattgtgccaagatctggaccgttcaggtactttatggttctgattgacgcatctactagatggtctcatgtgtgtcttctatcgacacgaaaccatgcctttgccaaactaatgtctcaaattataaggctgaaggcaaattaccctgaacataggattcaatcaatccgtatggacaacactgccgaatttacatctcatgctttcgatgattattgtatggcattgggatttcaggttcagcactctgttccatatgtccacacacaaaatggtttggctgaatcattgattaaaagaattaagcttattgctcgaccattattgatgaattgcaaattaccttcatcatgttggggtcatgcagttttgcatgctgctgaccttgtccaactacgaccaactgcatatcatgaaacttccccaatgcagttagtacgtgaaaatcctccaagtatttcccatttgtgtaagttcggttgtgctgtatacataccgatctgaccaccacagcgtaccgctatgggcccacacaggaaagtgaggatctatgtgggattcaaatctcggtcgatcataatgtatttagaacccttaacaggtgatctatttactgcctggttcgctgactctatctttgatgaggaacatttcccggcattagggggagacttcaagtaccagaaagaatgccagaaaattgattgggatgcccaaggtattccagcctcagacccacatactactgaaactgaacttcaagttcagaaaattatacatttgaaaagacttgcaaataacctaccagatgcatttaccaattataaaggtgtgactaaatctttcattcccgctcagaatgcgccagaaagagtggaggtaccaaataaaaccactcaacttccactcactaaaaagataggaagaagtatggccactcagcgagaaacaattgctaataagcaaagaaagacggtagatgcaaaccaacctttagttggtacacaccaaattgatactatatatcaagcagatcgtgatagtctgcaacctagctcggtggtgcacaatgctgagactagaaattcggaagaccatagacacattgtttcgggagatcacgatgagtctataagggttgatgaaattgtcatcaactactttgaaactagtgaatcttttgatagaagagcttcaattgtcgacattaatttttctgaacaaattgctgattacctccaagttgatccagaacctaggtctataaaagagtgccaaaagcgctctgactggaacaaatggaaggacgcaattgacgcataattagcctcgctttacaaaagagatgtattctcggctgtaatgcctactcctcgtggtatctttcctgtgggatacaaatgggttttcgtccggaaacggaatgaaaacaacgaggtggtgagatataaagcaaggcttgtagcacatggttttacgcaaaaacctggcattgatttcaacgaaacttactctccaattatgagtggtataactttccgatatttaatatcattggtagtacaaaatcgtctatttatgcagttgatggacgtagtgacagcatatctttatgggtcacttgattctgatatttacatgaaggttcctgatggaatcgacatcccgactcagaaggtaaatcgtaacatgtattgttttaagttgcagaagtcactttatggcttaaaacaatcgggcaggatgtggtacaaccgattaagtgaattcctttcactaaagggatacactaaaaatgatgattgcctgtgcgtctttatcaaaaagtcccccacaggattttgtattatctcggtatatgtcgatgatctcaacatcattggcaatatacaagatattaatgaagcacgttatcatttaaagacggaatttgagatgaaggatttgggtcaaaccaaattttgcttaggtctataacttgagcatttaccttctggaatccttgtgcaccaaagtgcatatacccagaaaaatttggaaaaatttaatatggacaagtcatatccttccaaaacccctatggtggttcgatctctagacgtggagaaagatccatttcgaccaaaggatgatggtgaggatgtgcttggacctgattttccatatcttagtgctattgacgcactcatgtatcttgcaaatagtacgaggccggatattgctttctcggtaaatctattagcaagatacagcgctgctcctaccaaacgccattggactggagttaagaatgtctttcaatatcttaatggcacaagagatcttggacttttctttaaaaagaaccaggattcgactttaattgggtatactgacgctggctatctatctgatccccacaacgccagatcacaaacaggattcgtatttttacaatgtggaactgctatttcatggaagtcttctaaacagactctggtagccacttccacaaatcattttaaaataattgcattatatgaggcatcacgtgaatgtgtatggcttcgcaggatggttaaccacatattaacatcttgtggtattggttcattagaatcacctaccattatctatgaagataatgccgcttgtgttgttcagatggaaactggttatattaagagcaacataactaagcatattgcttctaaattattttatcctcatgagcttcagcaacatggagagataaacatcttgcaaactaagtcatgtgataatcttgctgatttattcacaaaatctctgccatactccacattctttaaatgtgtcgaatgaattggtatgagacgacttaaaaatttgcaggattcagggggagtatcttcctctggaaaataacctattttcgtcatattatactctttttcctttgtatgagttttaccctttaggttttctcatccaaagtttttaacaagttaatgtcaacataagttatatgtcttatcatttggcttttccatactggtgtttttactaaatgataactatagacattatactatttctggatcatactatgagctttactcattaagatctaaaaatagtcaatgatatatcacggttctctccttatttttcccattgggtttttgaggagttctatgtgatgtatttaatatactaactataattatttctaagattatctttacagatatctggaacaataagtgagcaatgatcacaggttgattcgatcaagggggagtgttaagaaactacgggtgatctcatccacccaaagaaataggaacaacggttcctaatctaaccagtagagaagaggagatcgctcctctctctccctttggcgtccctctcgacaaccgacgcgatgttcccaaacatcgcatccactgcggttgataccgcttcacattgtataaatgtactgttgatcaatgagaaatcgatctattcgctctattgtgttcaattctctctctcgctcaatcaattctatccacattcaacaaaatttatgctatttaaatactctctccgtcccaaaatataagtattttttgattctgacatggtctccgagatactgcattgcccaacaatatctataaaagcaagatgttttaaataaaaaaaggttacatattatgatagtttgtttaatgataaatctagtaacatcaattttatatgattgatctttttttttgctattaatagtcaaagttgaaaatgtttgacttatcactatgctaaaaatgcttatattttgggatggatggagtagctgaaaccgctcgatgcgggaagagttatgacgagtaaagatctctacctgcacatccattgtctagtgtctagctgatattttagaggaaaatatatttgttaatgtttgcctccaccgtgtaaaatgccagatcaagaacttctctgaagacaagacaagtgacatagaaattcttgatctgctaggcatgatgtattgttcccattcattcgatttaccttgtatatatattattgtctagaaaaaaaacaaatcatgtgtcgtatttcccccttgattttaaggtcaaaaacttgtgcgtgtctcatgaaatccttataccgaagtgttcgacttagccggtccatatatgaaggcaaatgatgctcgatatcatacataagtaacaaactgatgtggatgaaaccataacaatttaacaaaccataataattggaaacttggtgtgttttacctgcacaagaagctaagaatcataaactagtttatgtgcagctacatggaaatgataataattttacttgacacatgtatggaactagcaaaagggcgtactcatcaatatcacttccgagacatccttgaaattgatgctgacattggctactcattaacttgatcttcattcaccgtacaaagcattaatcagggatgcagctacatatatatagcagttctacaatgatccattcttgtagtaagaatgaaagtttcttttgtgtgcttcgaccgcttccttgtaagcttgcctagagaacaactaggctcccctcatcaacatcagttgttacgggagaggtagcatcaacacttgagttgtcggtgttttgttagcctgatacctaccattccccatttctattctacaccagtccactcttaaccaaactcatattttcattctctcgtctaacagggtggaaatttagaatgatgatgaggaagaagagagtggaatttcacaattgaacagatgacaataactattctctagttctctgttttatatgtgtctaccttggccccgagatatatgtgtagatgcttatgtgctatttatagctaggtacactactaggaaaatcattttcccagacagccaaaaattgttttcccaggcagggggaaggcccagcggcccatctacaaaaattattttcgcaggcggcatctccatcttcacaaccgctatagccacccgcctgtaataatattttgggcgaaaaaaaaaagtcgccaccacccccacccgcacccaccctacccacctccggccacgccgccgccgcaaccctcccaccaccggccggatctagggttagggttttgggagcgagaggaagatggagagggagaggaagggcaggtgaggagaggccactgcagggccgccaccaccaccctcccttcggctagatctgggagggagggcgccctccccctccccctccccccttcggctagatctaggagggaggggacgggagctgcatgtcacaccctaaaaatcccaaatatataaattgttgtttaattggaattattagaaataattttaaaagcctagaagaaaagatctaattttaataataaattccaatataaaagtgggctagataaaattttattaaatactttacttgattctgtagttcctagatttttctgggatttatttgagtcaaggaagtatttttaataaatggaattgcatttcatgaataatttaaattgaaaaaggttttaaaagtcttctttttggctttgggccgaaagtcggcccaaaacctccctctctctctccccggcccaagtcggcccacagccgcgcgcagccgccgctcgcgctctctctcccgctgacaggtggggcccacctgtcaggcccgtcgtctacctcgcgccgcccggctgcgccctagccgcccgagccgccgtcgcctccttccaaattccatcgcccctttccttctccagccaaatcgattgaggggaaatgatccccgggatcccctctatcttttctcttttggaatcgtcgtccaatttcgtttggaaatagccggattcgatctcgaatcggattcgtgtctctctctcccgaaccctaactttccatcgccgtcgccggtcgccatgggcctccgtcgccaccctctagcccctatttaaggacccccgggacctcctctctccgccgccaccctcgctttagcccgccaccgcctgtagcgccgcctccgagagaacccgtgcgccaccgtcgccgccgcttgtccagccgtgcgccgccgtcgctccggtcgtcgccgtcgctcgggaaggccgctgttgggatcgccaagtcatcgccgtcctcgtcccgccctccgtttccgccgaggatcaccggagcaccgccgtcgtcgtcgacccgatcgtcgccgccgcttcatcctcatcgccgtcgccgtccggttgccgtccgccgtcgtttgggtcaccggtgagttcgccgtgtcgccctctacgcgtagatgccctccgtttgcgccgccgcaccatcgttcgccggcaagcgtgcgaggccgagtcgccgctggtgatgacgtcaccgctgacgtcgtcgtcgttgtttccccgtagaccgcggtagatcaagttgatctcggccgtccgttttggataggatagatctcggccgttcgttccgtagaccgccgccgtgcacccggtccaccgtgagccgagcccgatgacgcaataattcctttttccttttcaaaaataattctatattgcgtcataattcaattaaaatctatataaatgatttaatccgatttaatctttaaaaattcataactaattcatcttagctcggatttagttggttcaagtctctatttttttctaaaattgagatctacatgttaaaaatatccacatgtactgttcatacttgtttatgtgctgttttggtgattttgctcttttttccttagattccgacattcccggagagtccgatttcgcaggagaagaatttgaagagttccaaggccagcaaggcaagtcacacagatcccaaacaaccctttgagcatgttgatcccgtttaaagctattgtttctattcaaccctttgagtaataattgtactctattatcaatttgttattgtgtgcctcggctgattcctggacgagggtttatacacatgtaagcgtttggaattttggatagaaattccaggcgtgaaaagttggtatcagagcctccttgaccctaggttttgccaaacggttacccatagaagccctctaaaactattgaaaaagtagaactattctcccctctttctcttttaattaaaccaagctaatggcacatgcagtttatagtccctttaattgttctcattcaaaatttatttattattcctgtgttattagtactgtacatctattactgtactaatggcccatttaccagcaaaggttttacaacaatgttttatttaatcttgttgcaatgtaataaacttagcatgttgattttatttcatttcttttgaaacctgttattcaaaagtgcaaaatttgtgatcctgttttcaactgtttcaacttatcttgcaagattggtttactttatttatttacctttcactttgatttctaactttattcaaattaatccaaaaacctgtgctattaattggataaatgtcttaactccctcctttcacttgtctttagatgccgcgctacaagcctgagtacttgtttggtactgagggatttgtccaggagttgcgtacgatgtccttcgccataggatttgggactgctcctttgtatgcccagattcctcatgatcgtgatgaagagaagtgctgtatcaaagtcaccttgaacagtaatcgtgaagatatcccatcggtgatgttcgaggctggagggggaagctacattcatgcttgtcaggaggtggcaaggatcaccataggagagctccgagaaagctacaatgatcagttggccgacactgagtatcgctaccatcctcgtcaaccccagggaaacgaccgtggtagctatcttgaacctgcagggattgagaatgatgctaccaccagacatttggttgagatgctgtgggccatggatgagacccgcgttgagattgtgttagcagctcaagatcgcgaagaccggaatcgtggtaagatttgcaagctggaggacaaggtggatcgtttggagaaggaactagccgcgttgaagggagaagcaccaccacaaaaggccagggttcgtcttaccgcaaggaagggagctctttttgtccctcgctaccagttggcgcctaaggttcgtgtggtggaaaaagaagctgccccagccccagcggatcctccggttgtcaacgtaagtgatgatgatggagaagagtcgaagcgcacccattccaaggtcgagtggggagctactaaggatgatggggacgagccgaacgagccttcaatcaactccgatgcccggaagacctaaacgctttgttaagctgttgccttatatcgttatgttagtttgcttgtttaaatttggttgtgtgtgtgggccttgcatgtggtttacatcattggtgggatgtaaacgcatgcgtttgtttgctttcaagtgttaggaagttggtgagttaagtggtgtgagagtcttcagttttgtaataatgaaactcagttaagatcaataaaagtcaagttagtaaaagttaattccctgtcctgaatagtttttcccctgtttctcttcttctgctcctgtctatgccagatggtgaatactcgcagcaatgagaatggccccaaccacaacaacaacaacggagagaatcccacgcttgcccaagtcctggctcaataggcacagcttatgaacatgatgatgcagcaactccagaaccagcaaaaccagggaaacaaccatgcacctccccagaacaagttagcagaatttcttcgtgtgagaccgcctactttttctagcactaccaatctagttgaggcgggcgattggctgcacgccatagaaaagtagttggacctgcttcagtgcactgatcaagagaaagtctcctttgcttcacatcaccttcatggccctgcctctgagtggtgggatcacttccgtttcaacaggactactgctgaaccaatcacttggcttgagttcaccgctgctttccggaaaacgcacataccctcaggagttgtgtctctcaagaaggagttcagggtgctcactcagggatctcgctttgtcactaaatacttggatgagttcaatcgtctgcctcgctatactccggaagatgtgtgcaccgatgaagagcgccaagagaaattcttggaaggactgaatgatgagctttcttacccactaatgactggggattatcatgatttccagaagttggtggataaggctattcgccaggaggacaagtacaaccgtatggagaagaagaaacaccggattgctcacttcaaagctcagcaggggaatagtcagaggccgcgtcttgctatgggacctcaggcagtgtcacaaggagggtcttcgtctgttgttcgtccgcagcgtcagttattcaacaacaatgctagcaacaacaatcgcagccaagctccacgtcctgttgcaactccaactcagcatcagcctgccaagagggagcaagggaacaagccaggagtgtgctttaattgtggtgaaccaggacattactctgacaagtgtccgaagccccgccgcgtgaagattgtccctgcccagaacaactcctccgcaccagcgtcaaaggctcatgtcaatcatgtggctgctgcagaagctcaaagtgctccagatgtgattttgggtacgttccctgttaactcagttcctgcaacagtgcttttcgattctggtgctacacattcctttttatctatgagttttgcgggaaatcatgggatggaggtagaagatcttagacgtcctttgatggttagtaccccgagtaaccaagcactctcatcgcaacgtagcccctccgtcagaatagagattcagggtgtaccatttctggccaaccttattctgttagaatccaaagaccttgatgtcatcctagggatggactggttagccaaatataatggtgtgatagactgtaccaatagaaaagtaactctcaccagcaatgacggtcaagttgtaactgttcattcattgccttacgggcctttaaggtcaagtctgaaccaaataactttggaagagattcccatagtacgggagtacccagatgtgttcctggatgatttacctggtatgccgcccaagagagatatagaattcagaatagatctggtaccaggaacaactccaatccataagagaccttatagaatggcagccaacgaattagcagaggtcaagaggcaagtagatgatttgcttcagaaaggatacatcagaccaagctcgtctccatggggagctccggtcatttttgtggaaaagaaagatcatacccagaggatgtgtgtggactatcgtgcactaaatgatgtgactatcaagaataagtaccctctgcctagaattgatgacttgtttgatcagcttaaagatgccaccgttttctccaagatcgatcttcgatcaaggtatcaccagttgaggatcaaagaggaagatatacctaagacggcttttaccactcggtatgggttgtttgaatgtactgttatgtctgttggacttaccaatgcccccgctttcttcatgaacttgatgaataaggtgtttatggaatacctagacaagttcgtggtagtctttattgatgacattcttatctactcccgaaccaaagaagagcatgaagaacatcttcgccttgcattggagaagctacgagagcatcaattgtatgccaagtttagcaaatgtgaattttggttgtccgaagtaaagtttcttggtcacgtcatctcagccggaggagttgccattgatcctagtaatgtggaatccgtaaccaactggaaacaaccaaagacagtctcagagattcgtagtttcctgggtcttgcaggctattaccggaggtttatagagaatttctccaagattcctaagcccatgacacgactgcttcagaaagacgtaaagtacaagtggtcagaagaatgtgagcagagttttcaagagctgaaaagtcgcttaatatcagcacccattttgattttgcctgatcctaagaagggtttccaagtgtactgcgacgcatctaagcttgggttaggttgtgttctgatgcaagatgggaaggtggtttcctatgcatcttgtcagttacgtccgcatgagaactaccctactcatgatcttgagttagctgcagtggttcatgcgttgaagatttggcgtcattatcttttcggtactcgtacagaggtgtacacggatcacaagagtttgaagtatatctttacccagccgaatctgaacatgagacaacggagatggttggaattgattaaggattatgacatgggaattcataatcaccacggaaaggctaatgttgtagcagatgctctcagcaggaaaggctattgcaatgctacggaaggacaacagttgccatgggaattatgcaaggaatttgaaagactgaatttgggaattgtcagtagaggttttgttgcaactttagaagcgaagcccactctcattgaccaggttagagaagctcaaatcaatgatcctgatattcaagagatcaagaagaatatgagaagaggaaaggctatcgggtatttggaagatgagcaaggaaccgtatggttgggtgagagaatctgtgtcccagagaacaaggagttgaaagatgcaattctgaaggaagctcacgacactttatactccatttaccctggtagtaccaagatgtaccaagatctcaaggaaaaattttggtgggcaagtatgaagtatgaagtgtgagatagcagagtatgtagctgtgtgtgatgtttgtcagcgagtcaaggcagaacatcagaaacccgcaggtttgttgcagcctttgaagataccagaatggaagtgggaggaaatcggtatggatttcatcactggtctacccagaacgtcatcgggccatgactctatttgggtgatagtcgacagacttaccaaagtggctcatttcatcccggtgaggacaacatatttcggaagccgtttggcagaattgtatatggcaaggattgtgtgtttgcatggcgttcctaagaaaatagtatccgatcgaggtagccagtttacttcaaagttttggaagaagcttcaggaagagatgggttccaagttgaacttcagtaccgcttatcatccgcagatagacggacaaaccgaaagggtaaatcagattttggaagacatgttaagagcttgtgctttagacttcggtggaagttgggataagaatctgccttacgcggaattctcgtacaacaacagttatcaagctagtcttcaaatggctccttatgaagcgttgtatggtcggaagtgccgcactccgcttttgtgggatcaaacgggagaacgtcaagttttcgggactgatattctgagggaagcagaagagaaggtaaagatcattcaagaaagattgcgtatagctcagtctcgtcataagagttatgccgacaatcgccgcagtgatttaagttttgaggaaggagatcatgtgtaccttcgtgtcacgcctctccgaggggttcatcgtttccacaccaaaggaaaattggcaccacgtttcgtgggaccttataagattgtcagtcaaagaggtgaggttgcttatcagttggagttacctcaatccttggcaggtgttcataatgtgatccatgtgtcaaagttgaaaaagtgttaaagggtacctactgaagaagctaatcttgaacagatagaagtccaagaggatctgacatatgttgagaaaccaatctgtatcctagaaacagatgagagaagaacaaggaatcgagttatccgtttctgtaaggtccaatggagtaatcactcagaggaagaatctacttgggaacgagaagatgaattaaagtcagctcatctgcatcttttcgccagttcttccgaatctcgaggacgagatcctgtttaagggggtaggtttgtcacaccctaaaaatcccaaatatataaattgttgtttaattggaattattagaaataattttaaaagcctagaagaaaagatctaattttaaataataaattccaaaataaaagtgggctagataaaattttattaaatactttacttgattctatagttcctagatttttctgggatttatttgagtcaaggaagtatttttaataaatggaattgcatttcatgaataatttaaattgaaaaagttttaaaagtcttctttttggctttgggccaaaagtcggcccaaaacctatctctctctctcccacctgtcaggcccgtcacctacctcgcgccgcccggcagcgccctagctgcccgagccgccgccgcctccttccaaattctgtcgcccctttccttctctggccaaatcgattgaggggaaatgatccccgggatcccctctatcttttctcttttggaatcgtcgtccaatttcgtttggaaatagccggattcgatctcgaatcggattcgtctctctctcccgaaccctaactttccatcgctgtcgccggtcgccatgggcctccgtcgccgccctctagcccctatttaaggacccccgggacctcctctctccgccgccaccatcgccttagcccgccgccgcctgtagcgctgcctccgctagaacccgtgcgccgcagtcgctgccgcttgtccagccgtgcgccgccgtcgctccggtcgtcaccgtcgctcgggaaggccgctgttgggatcgccaagtcgtcgccgtcctcgtcccgccctccgtttctgccgaggattgccggagcactgccgtcatcgttgacccgatcgtcgccgccgcttcatcctcgtcgccgtcgccgtccggttgccgtccaccgtcgtttgggtcaccggtgagttcgccgcgtcgccctctacgcgtagataccctccgtttacgccgccgcgccgtcattcaccggcgagcgtgcgaggccgagtcgccgccggtgatgacgtcaccgctgacgtcgtcgtcgttgtttccccgtagaccgcggtagatcaagttgtctcggccgtccgttttggataggatagatctcggccgttcgttccgtagaccgccgccgtgcacccggtccaccgtgagccgagcccgatgacgcaataattcatttttccttttcaaaaataattctatattgcgtcataattcaattaaaatctatataaatgatttaatccgatttaatctttaaaaattcataactaattcatcttagctcggatttagttggttcaagtctctaaatttttctaaaattgagatctacatgttaaaaatatccacatatactgttcatgcttttttatgtgttgttttggtgattttgctcttttctgtttagattccgacattcccggagagtccgatttcgcaggagaagaatttgaagagttccaaggccagcaaggcaggtcacacagatcccaaacaaccctttgagcatgttgatcccgtttaaagctattgtttctattcaactattgcatttattttcgaatgtcattgggtggagataacctattgctttgttatagcccttttgttattgattacctattctttgtcacttgggtaataatatgattagctagaacattatatggttttagctaaagtgaataggatgcttagccatgcttagagacactagctcatataaatgggatacttatgattcattattatttaatcatggtttaatgatagctcacgatggttaatctgattggttaattaattaatttgccaactaaaacctgataaaggtgggttgtgagcacatggttttgatggtcgtgctcatgacaattaaggaccggttcacgattttcggttgtgaaacatttaccgtgccaaccacaagccagcgtgggcaacggctttattttctgtacagtatggttcattgtagagcaacagactgtgaagtggcggaaataagcccacgggggtcgctggggagtccatgccttgtttacaagggggtgattatgatccgggaacggtgcactgctttgaattgtgttatatagagggtattgtcacaatctctattcgggtacttgttaagtatcgcgatgcatggttgacatgatgttgaggttgtgtcttgtgggtacagtggtacacctctggccagagtaaaactattcgaatagtcgtgcccgcggtgatgggcgggtttaacaatgtctttcgtgattagtattacacctctcactataataaatgatgctgtaattggtaataatttgtttagctcctggtttggaatggtatattcctggtttgctgatagaagccaggattggttgttcagaatggttgggcctatgcaacgggtatgttgtatagcgttgaattaatattgtttaattaatactttactgttttattaaattctgaaagatttattaaatgctatttatgcaaaatgagactatattatgccatcctttgctatcctttgcacttgcatatttgctgcatggcttgctgagtatgtcatatactcaccttgcaatcattcatcagaggaggagttctacagtgatgctgatggtgtggaggattaggtgtagccttggtcaagctgcctgtggaatggagtcgtctgcgcagtttatcttattttccgctgcttagaactttattgtttgagaggaactatctacctctgtaatgacattttattcgcttattaattagagtaataattgtactatattatcaatttgttattgtgtgcctcggctgattcctagacgagggtttatacacatgtaagcgtttgaaattttggatagaaattccgggcgtgacactgcaccttgggggtgccaccaccgcccttccccctccatccggccggatctgggaggagggaggggagccaccgctgccgccgccctcccccctccccctcccccctttggccggaaatggaaggaaggggagggaagctgcgccgggggtaggtgccgatgccgccaccacctggagccaccgccgccaccaccctcccctctccggccccccagccggatttgggaggagggaggggagcctgcgcagacacaaccctgctccctacccccttcggccggatctaggtgggagggggcaaccacgctggggtggatgtagccacagccaccaccttccagtcgctccccttcatctagatctgggagggaggggaggggagccgcgccggggaaatgggaggggaggggaaaggtgggagggaagagagacttaggctgtgtgaaatttgcatgggtaggtggtgatttttatgaggtataaatttttgcaggcgaaccttttacaattaccctacaaaaatacccttatttttacagacggacctctagatccacctgcgaaagctaatttttgcaggtgacactagatttatagtatctttagctattttttataaacggtgattttatagtctgccagaaaaaaaaatcataacgttgggaaaaataatttttctagtagtggtaactagtgggtgcaatcagtcagacaatcaaatattttgaggaagctagttgtcagttaggtgtgtggttacagttttcagataataaaagcttttattgaaccctaataaaaacttccattatataaaaaaagtgattgaaatattataaactgatctaccaaaatattaatcccggtatgattaaatatattttcttatttaagtacggggagttcaaccgctgaggctacttcgaagtcctaagttgtcaatatttcacaaatatgttatctagtaagatttaaagatatactcctttgtcccaaaatagaccaacttttacctataaatatgacaaagtcccaaataaactaacttttttaacctaaagctgatttattttggaaaggacggacttactagcaagctctaataactgattcatatcaatttttctttactctcccttcttcctccctattttctcaagtttgaatttgttgcattgtatcttgcgcctagagcccatcttaagaaaaatgtctactcccttctctctccattgtatgaaagacgaacaatcaggtttatattaataatattgtacattctgtatggtttttaacatggtccaatgttgccttaggcaaacgttttggacaatttgaacatttattatttataggctatatttttgtaaccgtgtaaacgaaatgtcttttgcttcaaagtcgacggaggtgcttgcatgttgttggtacttttacttccttctgtgccaatgcaacgaggcgggtcttctgcctctgctcccaggaagaagaaaaaagtattttgcttcacttatctggtcttcgagtatgaattcgttgtgcatgcatgcatgctaccatgttgacacatattgaatatatcagctataactctttaatttgtttaaattaatggcatttcttattgttcttcattttgtcgcggataagagattgatgtagtatatatgccattttatggtgcgtggtcaatattaattggagccaggaataagatcttaaccaaggcaggtgatagagaagtttttgagatgccattcgctaattactgttctcattcatccatttacctctatattattttccagattacacacaagcaagtcacgtgtttccttgtttttaaggtcaaaattgccatgaacctgttgggatacgcataggctacgatagcataaatcaaatttttttatcgcgtaaagcaggaacaatgcaagtattagattatagatcgttaccactcaacgcgctgcgcagcggaagaagacgctgagaagtcgaaggaactctcgcgaagtagcgcacgtcgatgtagaggaagtagtcgatcgcaccggctcgaccttctcctcctcgtgcgttctcctcgccgtactcccacgccgatcagcaccgcaaaccagcggcgcctctaccggtatccacacgtacaggaacagaacgccacgcgcagatgtgctagcacccgcgcgcggctagggttttgctcggggagggaagtgacggctagggtttctcacatgacgcaatgcctccgccggtcacacccctcacgaatatataggatccatcactcgggcctctaaggcccgtaggactcctattcggatccctatccgaattaagctcatattggatctccatccaatccccttattccagcccattaagcgtacgaccctgtaggttcatatatactcggctgtaactcgaaaactccttttcggtccacgcgtcaacagtggcccctagcagaacgtattgacccaccgggcatacataaagatcatatcggctgaacctctagtgtatacttgtatgaacccctttgcctcacgatatcgattaagctcaaggctagatatgtgccatcctctaatagctcaatcattcactcgaacctgttgatagattatataacttgtgattgactcctcaatcacctttggcatggccatgcacttccataatctacaacatcgaggggcccagagatatctctccataggaggggcaaatcccatcttgattattcatatcccactatatatttcatagcatatccgaaaactacttttataactacccaattacggagtagcgtttagtagtccctaagtaagctactacacatgttgggaaccataataatctcaggtttaaagattcaacaccaacactaaatgagatcactgatgacacaacacatatggctcttgcagtgtctcatgttggatctatccaacaacatgttcaccaacatgtgtccacattattaatttggtatatatataccatgatccatgagacatgatcatcaattaatacatgtgctaatcatctaaacatatttgttccacatatgatatttgatcagggatcctttagaaatagcaacacacaacataaagagtctcatgaaagaatcacatattcattaaccaataatgagtttatctatttcaaggaacaaagtcggataaatgtgtaaacatagtgtgtgatacaatcatctctatgattgcctctagggcatatcactaacagaaacctgctgaaactttcaacttagctggttgatatatgtaggtgaaatgtggctagatatgtacttcatcagcctaatcaagaaggggagattgtcaacacctggaattgttcagaattctgaaggtgcacatccagactttcagaagatagccggcaaccaagtcaccgataggtcgacttctcatgtaaaaatccatcgctcaagaatcactgagaagattaaatgaaatccaactgctggacaaagagatgataattactgttggatcggatgactattctccataaaagttcatgtttgcatgtttaataatagttcacctcgttctcatttactaatgtaaaaactgagagatactccgtatctctttactacagtgaagtttgtccaggctgtaaaatatttttagatccgctagtgcttataacccattatgatggtgaatggatgatacaaacaacaagttctctggctagctaagtagtagttcactggttattcggacctcatatctggatgggtggagtgagagactcgaagggcaggggacactgctgcacaaaccctctgtagtcccggtttctaaccccctatagtcccgagtagcaaaccgagactacgaatccaaaactaaatcgttatctttggtcccggttaaaatacctgggagtaaagatgtatctttagtctcggttggtgtgttaccaaccgagactaaagatggttgagccacgtgattgacgtagccatctttagtcccggggctatttttttttctttttttcctccttcatttttttttctttttttccctcttttcatattgattcacataatagatatcacaaatttatccacaatatcacaaaatcattcacacagatcatcacaaattcattcacaatacatcatcacaaatttattcacataaacatttacaagcacattcacaaatcaacaacatccacaaatcatcaaaaaaatcaagaaaaactcaaacaaataatatctacccggccaccggctagcctccaatcctgtcaccggccagccaccattccaccgcctcccctccggccggatctggcggaggggagggcgaggccgccgccccgcgcccagccgctgccggccggcctcccatcccgccgccccgcgtcgggccaccaccggctggcctccatcccgccgccccgcgcccagccgccgccggccggcctcccatcccgccgccccgcgtcgggccgccaccggcctcccatcacgccgcccgccagaggggaggagaggaggggagggggccataggagaggggaggaggagatggggtgagagaagaaggaaggggatggacagagagcaggacttagcatgcgcacaagggggctcgaggctttttttcccggttgtttaacaaccgggactaaaaatagatctttactccggttggtgttaccaaccgggactaaagataatagaggggtctgacaccgcatcccatttattgaaccgggactaatactccctccgggctaaaaatacttgccgttttagacaaggctaaggtcaaactttagaatctttgattataaatcatttttaaaatatttctctttcaaatatgatgactacatgtatagattagtcttaaaaagtagtttaataaaatcatatatttgttaacacttttatacatattataattgaaaataatggtcaaggttgtttttgaagaccgtgcccttgtcaaaaacgataaaaacgacaagtattatcaacccggagggataatgatttttagtcccaccaaccgggactaaagatcaaaaaatactcattggcttttgaaccgggaaaaaaatgatttttagtcacggttttttgagcaatgggactaatgtggtttttgaccaaccacaaaaaatggtttctccaatagtggaaaaaaggaattgatgcggtaaaaaaatagtaaaaatttattgatcttgtttaacatgccaatagcatgttaggccttgtttagtttctaaaacaaaaaattttcaccaatcacatcgaatgtttgaacacattcatgaagtattaaatgtggataaaaaaataattacacagtttgcgtgtaaattgcgagacaaatctttaagcctaattgtgtcatgatttaataatgtggtgctacagtaaacatttgctaatgacggattaattaggcttaataaattcatctcacaattttctggcggaatatgtaatttgttttattattagactatgtttaatacttcaaacatgtgtccgtatatccgatgtgacatccaaaacaatttttttaactaaaccgggctactgtattcctagctactaatttactttagatgatgtggcacacgtatatcgctagcggccgacgatactaaacctgctcttagccgaaagtcctaaggggcgatcgatcggtcaccctccccacattgatcaccacctcctccacgtggtttccttttttgacatcaccttatttttctattttagtaaatttatacacctaaaatttgtacacctcaagtttacacatctaaagtttatacacctaaagtttggagacccaaagtttagaagtcaaaagtttataaatccgattcaaatttgaatgacttcaaatatttttatatatagtatttctatacgtctaaagtttatacacctatagattatagtttatagaccgaaagtttataagtcaaaagtttacatacccgattcaaatttgaatttaaatttaaatattttttatatatagtatttctatacatcaaaagtttatacacctaaagtttatagacctaatatttataagttaaaagtttacatacccgattcaaatttgaatttgaatttaaatattttttatatatagtatttctatacataattttttccaactttgtttttttatttttttaaaaaatttatggtgtagtaggaagagaagaaggggaggaggaagggggagagagcgtatattggggatggggatcgaatcacccattagccacacccgctcttagctggtcagatacgtacgtatttttgtatcagcccagttaacaaacaccggtggagaagtgatttttactcccgtggagaagtgatttttactcccggttcgtaaccctcttagtcccagttttctatctttagtctcgggtgaaataaccgggagtaaaaattaatttttagttccggttggtgttaccaactgagactaaagatagagcctttttagtcccggttggtactaaagaatgagccaaactagatctggttgctcctttattcttttcttttcttcatttcattatttttaatatattgatttcactccatcccgcccccaaaatcccaaatcaatcatccccgaattgtaaaatctcaaatcgattatcacctctaaatcctcaaatcctcaaatcgatcatctccaaatacatcacaaaatcttaaaaaaattacatcacaacttctacaaaattcatcacaaatacaatacataaatcaaatacatctcaatccaaatcacaaatcctaaaaaaaaaagaaaaaacctaaatcggcacctaagcccaccgccgcccatcgccgcgcccccacgaggccgcccggcctaccgcgaggcggcccggagcatcgcccgccgtcgcgtcgccgcgaggcctctagctgctgccacgccagccgcccggctctccgcgcccggccgccgcgcgccgccactgcaggtggggaggaagggggagggagaggaggagaggaagagaggagttgaaggagagggagaggaggagagaaagagataaggtgtgagccagaggaggagatagaaccgagagggaggagtgtcgatccgatccgcgcgcatgcctctccatgtatgttgatcttttttcccggttggtaacgccaaccgagactacaaatatatctttaggtagtctcggttggtgttaccaaccaggaaaaaaagagaataaaatttggaaatatactgttcattcattttatttttagaaatattcaggattcaaaaattttaaaaaaaaatataccatcgatttcgtacaaccttgcgcgaaagtgacgtggcgtgacgtcgcgagtgaacaacgcgaaaccgcgcggaccgttcggtctcgccgaaccaatctgcgataccggatttcaaaatgattaattagtgactaattatcatgattagcaattaattaattaattaattattaatctctaattagtattagttaaatagttaattacgtcattagtgactaaccaaagggagcattggtacggtatcgcactctttttcagcgataccgcttggtctcgctcgttcttcccgcgagagcgcgcggtctcgcgccagaccgtgctatggcgcgagagaccgggcggtctcgcattttcattgtgcgagactgtctttaacgtcacctcctcgtcattttcgcttaatggtggtgcgagatcgacggtatatttttgaaaaaaattacatatgtgcactatatttttaaatttaattcggaaaaaagatcgatataacataagctttactcccggttagtgttaccaaccaggactaaagataaaaaagtactcctgagcttttaagctgggattaaagatatttttagccctggtttttaatacaaccgggactactgtgaaatctggtcgaccgaccaaagatgggtttctccagtaatgaaaggttgacaacatggagacttggtgtcttgacactgcaaccatactgtacccaaaatcacacaagttaagattcaagaactatatatttgtgcagttacatagcatcggaacaaatttacaggtaatatatgtatggaattcataaaatataagtatagcaacagcacatgaaatctgatacatccctgaggactgagatgcatggggttcgacagccttcagtcattagtgtcagtgatatgctccagaagcaatcatagagatgattacattacatactatgtttacatatttatccgactttgttccttaaaatagataactcattattggttaataaatgtgtgattctttcatgagactctttatgttgtttgttactatttctaaaggatccctgatcaaatatcatatgtggaacaaatatgtttaaatgatcagcacatgtattaattgatgatcatgtcttatggatcatgatatagagataccaaattaataatgtggacacttgttggggaatatgttattggaaagacccaacatgagacactgtaagagccatatgtgttgtgtcatcagtgatctcatttagtgttggtgttgaatccttagacctgagattatcatggttcccaacatgtgtagtagattacttaaggactgctaaacgctactccgtaattaggtagttataaaagtagttttcgggtatgctgtgaaacatgtagtgggatatgaataatcaagatgggatttgcccctcctatagagagatatctatgggctcctcaatgttgtagattatggaagtgcatggccatgccaaaggtggttgaggagtcaatcacaagttatataatctatcacaggttcgattgaatgattgagctattagaggatggcacatatctaaccttgagcttaatcgatatcatgaggcaaaggggttcatacaagtatacactagagattcagccgatgtgatctttatgtatgcccggtgggtcaatacgttctgctagggaccgttgttgacacgtagaccgaaaaggagtttttgggttacagccgagtgtacatgaacctacagggtcacatgcttaatgagccagaataaggggattggatggagatccaatatgctcttaattcagatagggatccgaatagggtcctatggaccttggaggcccgttatgtatcctatatattcgtgaggggtgtgattggcggattgattgcatcacgtgagaaaccctagccgccactcccctccccgagcaaaaccctagccgcacgcgggtgcgagcacatctgcgcgtagcgttccgtccttgtacgtgtggatagcagtagaggtgccgctggtttgcggtgctgatcagcgtgggagtacagcaaggagaacgcacgtggaggagaaggtcgagccggtgcgatcgactacttcctacgcgtaggggtggaaacgagccaggccctggctcggctcgacttgcagtggctcgtgacaagctaggcttggcttggctcgactcagttaggaaaacaagctaaaacttgagctcggctcggctcgtttcctggctcgtgtagttattaaaaaaagcatgaacaaatcatcaacatgcaaaatttaaataagtttatatattaaattcttcaaactcttaatgataaatttcaagttgagaaataataacaccatgaaaagtaaaataatctttataaatgcataatggcctaggctcgtgagccaaaacaagcagctcgcgagctagctcggctcggctcatttcagtaacgagctgaaaaggtggcttgggcttggctcgttaggcttacaagccgagccaagccaaccaaactcgagccaagcccgagctgagctcacgagcccgagattttttttccacccctatcgacgcgtgctacttcgcgggagttccttcgatttcttagcgccttcttccgatgcgcagcgcgtcaagtggtaacgatctatgatctaatttttgtatggttaatggcttacgcgatagaaaattttcatttacgctatcgtagcctacgcgtatcccatcaatttggtgacagtttatcccaaagattaccagaatgtacatggaagcgtcagaagaacgttcacctcaaagatttgccagagcgtacaggtatcttgtttgagcctccatcgcgtccttgcaaccttgcctgacgaagacgaatggcttgaagtactatattgatttctgatgctaggggactagaagctccaattgtttgcacattcgaggtgttggtgttttgccaacctgatacctaccattccccatcagttcttgtcctataccaatcttctcttgaacacatgtcttccattttctcatctaattaacaggtacacacttagaggacaaagaaaaagagaagaatgcgacaactattttctagttatctttgcatatgttctatttatagctagatagctagtgttgaatttataagcacataatgatttaatttattctatataaatcataacattgcagatataatttagcatgaagaacgcatcattaaatctacatatgtaaactaagcagtaaaacatgaatagatctaatatgcgcaacatgttgataacgtaccgagggtaccggaagaccggttgctcagcaggaattactcgcggttgcggacgtcgacaacggcgcgcagtacgcgagcgaacaggaagacgagccattgtggtcgaacagggagcagtcgtgcgaagcgcttcccaaaaaccttattgctgccttctcccggtgcgggacgtcgaaggcagaggttccaaagacctgctctcccgatcaccatgcacgccgacgagcggaatggagtagactacgagtgacagtgcagtacataggaggagacaaacccttaattttaaggaattgaaaattagtttttttaagagtagagtgggtgaattgaaaattagtttttttaaagagtagagtgggtgaatctggccaattctagcttcaatgaaaatccttaaaattgaccattagaaccaaatccaatgaaaaatagttttcagtcaggtgtttgtgagaaaagaggggtgaggaattgaaggaaaaagtatgaattaccctcgaactattgcggtcgtccgaattacctccctaaacccaaaaaccaatcatcgttcaccccgaacttttaataccggacgaattacccctctcgacccaatgcaaagcggttttgtcctacgtgatgtacgcatggcaatccagtcagtattttattataaaaaagtgctggggtccacctgtcatacatcctctttcctctccctcttctcctctctctctctcatccacaagcagagacgacgggtatgggcggcggctggaggaggcacggcacgcggaggaggcggtgctggcgatggccgagatggagaagaccaagtgtcgcgcggccatggaggcggccgaggcggcgcaccggctggccgacctggaggcgtagcggcggcgcaacgccgagaggccgacgagaaggtccgcgccctggagcgtgtagtccgattgcctgcgcttgaacacaaggcagacggcggaggcgaaggctgcgagcgcgaggaggaaccaggagcagacgcagacgcaggagcagcgggcgtggcgggtgtagacgtgtagtgctggaagaggcgcgcgttctccggcggcgggatgcggaacaccttgtccttgggcatctgcaccacgtacgtgtctagctacgccggcggcagctgctggtactgccgcgcgtcggcgggcggctgcaaaatcactgatgatgcaagccatcgactgcaaattaaggccatgcatatatacaagtgtgcaagttagctctcgacaaaatcctttacccaacattccaaaacacgagctttgatcaagagaaaccaatctgctacatatgcagcacataaccacattcccaaagtccaaaacgcggcgccaaatcagatcagaaaattcagaagagggcagagacaaaaaaaaaaaagaacaaaaattccggcacgccgtcgcccatcgatcccgtggagccagcggttcaggatctcggcggagatcaccacggcgctgctgttcctccaccagaccaagccggagccgctcgtgcactgcgacctggacctcaagccggccaacatccttctcgaccgcaacatcctgctgcaggtgctgacgagtccgccgccgacggactcgtcagccacactcgtctactccggtgacgagtctgccgcccatccccatcatccccgcctctccgccgccacccacctgtccgcgccgaccggccccacccaccgtcggccgcaccgccatgcgcgccgtccgctgccttccccgcactgccgtgcgccatgccatgctgcgccgcctcggccgcctccatggccatgcggcacttggtcttctccatctcggccatcgccagcactgcctcctccgcgtgccgcgcctcctccagccgccgcccatcctcgtcgtccccgctatagatggccaaaaggcccgcccgacacggcccggcccaggcacggcccaccagccatcgggccagcacagcccgatcggcacttcgtgccgggccgtgccggctcatgggctgtgcctcccgcccaggcatggcccaccagccgtcgggccgtgccgggccggccgaaggcacgggtggcccatcgtgccttttttaaataagtctattttctatccctcctctttgggatgtgacatatatatatatatatatatatatatatatatatatagcgaaaacaagtctaatttcggtccctccactttgggctgtgacatatattagtgaaaataagtctattttccatccctcctctttgggctgacatatatgtaggtaaaataagtctatttaacgtccctattctttcgaccgtggcatataatatgtctatttttactccctattgtttatgtgtcgggcctggcctgcggcccatcgtgccatgccgggccggcccaatgtgtcggcggagaggcccaggcacggctcggtggtcgggccgggccggcacgggcccgacccttaacgggccgtgccgttcttgggccgggccaaaacgccgtgccgtgggccaggccatcagacctcggcccttttggccatctatagtccccgcttgtggacgagagagagaagagaagaggaagagggaagatgacatgtggaccccaccatttttttaataagaaaatgctgactggattgtcacgcgtacgccacgtaggacaaaaccactctggattggatcgagggggataatttgtccggtattgaaagttgagggtgaacgacgtctggttttcgggtttagggggtaattcgaacgaccgcgatagttcgagaaggtaatttgtaatttttccggaattgaaaaggctagtggttaccacttggcaaattctccatctttcttctgagttcctcttcttgatattcatcctgcagagtaaatggaagggtattctgtatatgtgtttatcattgcttcaactgaaaaacaagcccgggttgcctccttgttcatgctttatcttttttttcctgttttcaagtttgtttggattggactctaatttttaggaaaatatccactaaacttataaattgcaaatataatttctgtataaagtttatatatataaagtctagaaagattttaaaaagtttatatatactttttatattaaaaagtctagggtacacaaaagtctatatgtagaaaatttggatggaaatagttcatataaaaaagttttcgttaaaaaagagtaataaaaaaaggaaacaaaaaatttgagtggaagaaaaagaaaaaacgattcttatgaccatgatgaattactccctccggtttgataatacttgtcgttttacataagggtacggtcttttaaaaaacaacttttaccattattttttattatattatgtataaaagtgttaacaaatatatgattttattaaagtactttttaagactaatctattcatatagtcaccattttaaaagacaaatattttagaaatgatttataatcaaagattttaaagtttgacctcacatttatgtaaaacgacaagttataagtccggagagagtacgagagaataaggtacgtaaaagaggaaaaagaaatgaagacatacataagaatggagaaagaaaattgaaaacagcccatgcggtctccaaccttgaccagttcgcgataggctagcaaggcacagttgctgcgaattttttttatttttaattttttttattaaaagttttacaaaaataatttttcattttgaaaattgacagaagtggtcgcctaccgccctctgggagggcgatttttaaaaatcgccatcccagagggcggcgaaagtgacgtggcagacggccgttcgctctcgggcgacggccgtcaacgaaatttgcaggcggccccctttgccgccctccgctagggcgattttgtactgtgcggggggccgcctgcaaatgggcggcggggggcctggaattttgcaggcggcccccttgccgccctgggggagggcgattttatactgtgctttatattttttataaatatcaatagttatcaaatttttttatattgaaaactatacaagattaaaatctccaagactggtaaaatacaattttattattttttagggcctatttggaatgttaccgtacaaatattttgttagtgccaaaatataagcaagttttggcactaccaaatatttggtaaggtaaaattgcatttgatcatatttggtttgctgccaaaatgtaaaattgtagtgaagaatgttctacataatctcaaatctagattacgtattaccaatgaataggcttcaatcaaaatcaaacacaagtactattcaaattaccaaaatattggtagggcatgtttttggtagaaatccaaataggcccttagtcttacgcatacaaaaaatcaccatcataattaaacattgtaatgataagatagataagaagtgccatcgatacacggtacaaatttgtcgatcccgacgaatcaagcatgcggtaacctatcggccccttctaggtcggtcagaatgcattgcattctcgtggtccttcaatcgttgatactctacttgtgtttctgactctgttatcttctggccatgatatgatggagtgacattgtcgatccatcgagtaaatccacccatccttggattgccctgtaaaaatagtaatgttattcagtttgggtagtaattttgtgcaaatcatagcggattttgtaaatggttagacatacaacgaaatcgttgtctacattggggcagacaaaatatctccttcgaaatgtttgttcagcaaaggatgtagccacctgccagcgatctctgcacccacactttggacgctcggaccatttatgtaaccctaatggattgttcctccagtctaagcttgcaatttccacccgacgttcgtactccatccaagcatgaatgaactgtatggtcggttcaggttgcgttatcggcccgccacttgaagtaactctgactgtgtcaatccattgtacgaaagtgtgttgtcgtgagcataagttgttctagcaccatatgaatgaaaagaactatgtagacgagacaaacacaagtagtactgcagtagtaatagcaaaagtagtactgctttacaagtttgtaagccaaaagaaacggtcacataaggactgaagaggtagaacactactgacgaggcctcttacccctgtccctcctaccctgcgccctaatgtgcccctgggagtacgtgagtcggtccgggggtacggcacggccaacccgtcctgcctgtacaggtgtgacctctggctgctcctgagtgtgcgcctctggagctcctccaagctgagaggagcctagtacgtcgtggtggtgtgcaccgtgcaagtcgttgtcgtagaactggctagtaggaccagtcctaccggcgtgagacgaagaggccccagtaccgaagatcccggctgcaaatcctgctggacaaggaccatcagtttcatacatgtatttaatagtattaataaaaagtaaagtaccgtgtgggcgagggatcgacgctccgtgagaggaagaggtggcgaacgcgcccgaagaggtggcgaacgcccctgcggagctcgcggaagcgccggtcgtgcctgcgaacacgctcgaaggcagacgaggtcctgcgatgaggaaacgtgcagttaaaacatggtgacatattcgtgcaaaagctgaaacaaaaatgaactaatctctgggctgaactgtaccgtgtgaaaccggtgctgtaggtcgcactgctccgaagctaggggcgctcgaaggcaaacgaggtcctgcgaggatggaacatcaagttacgacggggtgatgttttcgtacaaaaacataaacaaaacttaagaaacctctgggctgagcagtaccgtgcgaaacaggtgccgtaggtcgaggtcctgctccgacggtaggcgcgcgaggccgtggttgtaccggaccagctggaggtacgacgtccacggcgctgcgacaggagaagacgcgcatgaccgcacgcatcttctcctgcatccggtcgaaggtcaccctctgctcaacgtcagtcaagtgcaaacctctgttcaacctcacttggactgcggtgatatcggcactgatatcccgtgcggcatcagcctatgcaagatggaaataaaaaattcagtagttgtcctatattatgcaagataaatgaaataattgtaagaactaatacaaattcgacgtacccccacgaagtagtctcggtcacggtgcgtgggatacgcatccgtgacagcggcaacgtgcggctctggggcgtctggagtgaaggtcacacgcgcacgagtgcgaggaaggtaccagcgaaggtagtcacggtagttctcctccgtgtgtgggaagagctcgttgatcacctcctctgtagctaacacccagtcgtcaacgtactgctgtacacgtggagcccaaagtgcacctgctagctgtccccgtcgagtcaacctgtgaagagaggtaaattatatggctcgatgaagtaagtatcataaaaatttagaaatgaacaatccgaactcacgagtggtcggcagggaggacggtcggctgcacgatgcccggaaacacctacctaagtccgaactgtctcatcacacgctgcgggcagtgaggctcaacgaaaatgtcgaacaccatcggcaggatggtgagccagtaagcctggtcgcgtgtgcacaaggacgaaagtcctagcggtgctctcgcagcgacggcctcttctgtgtacggctcccagataacgtcgctcggctggagacggtcaaactcgaacacgaagtccgggtaacctcgtctcacctgtacgtgagcgtaacgacgctgcaataaacatgatcggaattagacatgttatgtgaagaaaaaaaagaagacgactgataaacttataacgcagcgaagttgcactaaccccacgtcgacaccagtaagtccccatcgtgggaccgtcctctggccactgcgcgctgcgtccaaccccgtagggtgcgctctccaccactggtcgacctatggcaaacctctcggctgcccaaagctgaagcaacatagggcagccagcgatgatcgctcccgcgtcagtcttcgtgcacgcctcaccgagggcacggtacgtggctgctagcacggcagaaccccagctccactgcggcacgtcctgtggctgagcatccgcgatggaccgtgcgtagtggaccagccggaagtccacagcgtgcccgtgggtgctagtgaacatcacccacccgaacaaccacaacaggtacgcctcaagggagcgtcggaccgagtaatcatcagcatcagggtgcagaaggtccgcctacaattaagaatgaaatgttagtacaaaacactctgttgatcgcaaataagcatgtatgataataacaacttatttacttacagtgaactggagcaaccaagccttgctaggcccgactgtagagtacaggaggaagggtgttggccggtcctaggtgtggaaggtgcatcacctgctcgaagcgcgcagtgatatcctccttccacccaacaacaccgtccacgggaccaactggtgctcccgccagcggtagcccgagcaggtacgacacgtcctgcagtgtcggagccatctccccacagggaaggtggaacgtgtgcgtctcaggtctccagcggtctaccagagcggcaaggagtgaccggtctgcatcccaccgcttcgctgggtcacggtcgtccgccgccgcctcaacaagcctacaaagtggtagaaggcctgccgcacgcaacctgtgtagagcaaacttcaaacataagtacaacacaaagcaaagttgagttgaaatgtgaacatacgcgtaccaaggaacgtgacgggggtcgacacgcaaccactcgcgcgacgtgcgtggacggaaggtgccgagctgtgcaccctcgactgctgacaggaatgagctgtggttcctgtcaatcccacggttcaacagcgccggtgtgtcgtacgccatacatgcatcaaatagattggtcagaaacatataaataattagtcaacataaataataaatgttcataagcgaattactaacacatattaaacaagagtacaaacaaacaaaagtgtcaccatacggaatatttctgattacaacaatagctgcagttacacgatatgagtacttagtccgaacactcatcacgataacattatgatacaacaccgaatagttcgcaatactactagtacaacaatagtcggaggtactcattacaacaacattcaattgaaattacacgatagaagtatttagtccgaacacacatcacatcacaacagcgttttatttcctaaatcgatagcattgttacaccatggaatcgcctgctgcgcgacgaccttggccttgcgcgcctgcttgttgttccttcaccatgtggtcgcctaccatcacatgcctgtccagatggactagcatctgcgccgcttggaacttctgcattcttcgggcatttcttgtaagtatggccgcgcagatcacacttgctgcagcgtaaagtcctcccacctgcttctgactcatccatatcatttctgatgcgtctagtttggcgtcgaccctttttcacccttaacttagatggatctggaatataaaaaacttgggcactcagcgttgtgtaagatcctgagatcccgaacccatatatctcctcactccatgtatgaaagattgcttctttcctgaaataatttgagacgtacacattgggagatatgccacaatcaccggcagcagcaaaaacgtgtgagcaaggaaggtgatgaagcttcagcttcatacaactgcaggtacatccaccatccgtctttaagacacattcctgcacggcttgcttgcgatagataccacgcctgctcctatcaacacacattatttcataccgatgcacttgtgccttgagcaacaactctatgtctccgtgcctttttgattttatcttccatgtactttgtcactacgttgccaaacactatgttgttatcggccatggacggaccaattttcttgtatcgatccctaaagtacgcttgcgtgccgtgaaggatgaattcaacaatagcaaccaatggaagtacctgaactcctcgcattacccagttgtacacctctgccaaattggttgtcattatgccataccgagatccatcggtgtcgaacaatagagaccacttctccttaggatcattctcaatccactgagtgaaatttctgatggacgaccctgacctccttctcattgttggtgggtcatcatgtaatgcaccaagaggtatgggaggctcgtcaccttcaacttgtggtctgcgagattgctcatctgtttgcttcgttgtcaactcatccaacttgtcccacaactcattaaatttcttctcttggttctgtgcacagagcctcttaaagagctccataagatgcttgttcttgaattgcttgtagaaatttgcacccatgtgacgcatgcaccaccgactccgaacatcaagccacttagctggaagtcccttctcatcccaaccgttctgcaagtagtcaatagcccgcaacatacccgcatgacgatcatgtataaggcaaacgttgggcctcatacgcatcactgcaatgtgcactctctctaggaaccagtaccagctttcagtgttctcactctctacaaatgcaaaagccataggtagaacctggttgttcccatcacacccaattgctgtcaatatctgacctcggtatttacctgtcataaaagttctatctatgcatagaacaggtcgacaatgcacaaaagcattgatgcaagcacccaatgagaaaaaggctctttgcagcacactctttgttcgatcatcaaccgatgtaaatgtatgtaggtcatagtaagtattattattcctctgggcaatggtggctaacaaacgaggcaaattatcataagaagcttcaaatgtgccatacctcatctcaataatcttttgtttggctctccaggcctttgcatagcttatggtgtacttgaatttgttctcgatgtgcctaataattgattttggttcaaagccaatgttaccaacaacactgctgtacatctcacttgccacaaaagctgaagtgatgtttcggtgatacttctccaccccttgtaagtagcacttatgctcggtcacaatgctaactttccaataatcattccatttacccttatatgcatggacacgccacggacaatcttccttcatgcacctcacttcatacacataatttgttgacttgaccaccctaaactctctctgcaaggaaactgcccaatgcttcaccgcctccttcatctcatccttatgagcataccttgcaccctcaattacctcattctccttatactcccagggtacatgatcaccctctgatataacaagtccagagaagtcctcatttgcccaatcagtggccattacatcaccttcctcatcggatgatgcgtcgtcgtccgcttcctcattatccgaatcttccctctccatttcatcaacaattataccgactctctccccctcatccgccatgcccatggcctgctcctcccttggttgattttcctcattttgcatcgatggtccaacaacatcccttgcattgataggaccctctacatcttcggtttgcattgaaacatttatatctttctcttgtaccgacacaaatataacgaggggccatgaccgttcaaaagccatttccacataccgtctccaagcagcagtgctgtccatcggcattagttcccaaaaataaccttctgttgcacgactcactacaactgatactgacattgtgtagacttcttggtctattctaaatcctctcaacaaccaactataaattgactgaaatgttttctccgcaggcctatcgatgcccttagatgtcattacaaaatctgacagatcaacaccatctggaccaaatctaatatttccttcaccgtgaactatctgaaatgtgaccttatttgacattgtgcctgatgaaaacaataactgcgttaacctcgcatttctgtactacgccctaagttacattctctacaatattgttctccaaaattctaaaagtaggttacattctccagatcaaactaaactacatcttacaattaacactactgtctatgtctcaattcatacaattatattctatgctctggatctacacatatgtgctgtgtgctacagatatgctaaaatatatggaactaaaactaaaacgcaacatatatactcaaacataacatattagtacaaatgcaaaagatgtatgggagcaaacctgtgatgaagtgagcgaaccagcagggcttcgccgctccccttctgctgccctctcctctctctctctttcgttttttttggatttttagtgaatataatgaaatttcagagaggggagactgggctttatagggggaggcaaaaatcgccctcccccagggcggcaagggggccgcctgcaaaattccatgccccctcgccgcccatttgcaggcggccccccgcacagtacaaaatcgccctagcggagggcggcaagggggccgcctgcaaaattccatgccccctcgccgcccatttgcaggcggccccccgcacagtacaaaatcgccctagcggagggcggcaagggggccgcctgcaaatttcgttgacggccgtcgcccgaaagcgaacggccgtctgccacgtcattttcgccgccctctgggatggcgatttttaaaaatcgccctcccagagagcggtaggcgactacttccgtcaattttcaaaatggaaaattatttttgtaaaacttttaataaaaaaaattaaaaataaaaaaaattccagttgctgctaggtttgatgcggagtggaaaaatggaacgacaggattggaatcttctttcattcgccagctactcacaatgctctttgcaggcagaattggtggcgctccagttagctatggaggcggccaaatttttgaattttgcaatttgcagggattatcttcctcactgacaacgggacgaatcactacttaaaaaactatttttccatacggtcaaattgatttttccatacggaggtttcccccgtctagagccatgcatctggaaaaataaatattttcgcgtgcggacgacccaaccgcacgggataattatttttctgtgcggtcgggttaagtggaccgcacgggataatcgattatcacgtgcagtcaaataatgccgcccgcacggaaccaaaaataccaaaaataaaaaaaaaatcgaaaatcgccgcccacccgcatccggccgtcgccaccgcaagctcatcggcgacggatccgcttctactacgcccaccgtcaacggatccgtctcccccgagcccgtcaacgttgtcgcgagctcgccgaggtcagccatacgtcgaggtcgtcgtcatcgaggcgggcctcccgaggcagcggcgagggcgagcagccgctgagccaagctaccgccgcgcctctcgaggtagcagcgacgaacggcggggatggcttgcggtggtggtgggcggtatcgtcgaggccattgactctatggatccgcttctttgtcgcctcgcccggccgtcgcctcacccggccaccgcctcgcccgctcgccgccgcgcccagctgtcgccgcgaccagccgccgcctcgcccgctcgccgcaccggtctgccgcctagctccgtttgtcgcctcgccggcctgacagaggggaaggggaggaggagagggggaggaggagtggaaggtgtggagggagttgactggggaagagataaggtagagaaaggaagagataaagtagagagagagggggtagtttagagataataggggataaagtaagagagagaggatgtgaaaattttgaagtggatgggtgggaaggagggaggtattttcctgtgcggtccacttaaaaagcttgtacggaaaaatcgattttgtcgtgcggtccacttaaatcgaccgcatgagataatgatgattatcccgtgcggtcagattaggaggcccgcctgagaaaatcgattttcctgtgcgggtgacagccccgcgccggtccccttatttttccgtgctgttccacttacgaaccgcttggaaacaaaaggggtggcgtacaggaaaatctatcatgtagtagtgaatgcagacacagccaagaagagaaactttggtcctgtttcgttcccaaaacttttttccaaaaacatcacatcgaatctttgaacacatgcatggagtattaaatatagataaatttgaaaactaattacacagttagtggggaaatcacgagacgaatcttttgagtctaattaattcatgattagccgtaagtgctatagtaacccacatgtactaatgacagattaattaggctcaaaagattcgtctcgcggtttccaggcgagttatgaaattagttttttcattcatgtccgaaaatcccttccgacatctggtcaaacgtctgatgtgacacctaaaaattctcttttagcgaactaaacaggcccatttgatgaggatccaggccattggagtcaaacaaatattctagaaggttccatggaggtcatgtggattccaagggagatcaatagggtggcagacaagctagttaagtaaaatcttatcagccgcccatacctcttcatgatcgacacaacatatctcacatcacttatcctaatagaagttgtcatgcaagaaatcttagatattatttctctactgcaatctatatcatccatcatgtactctgtttctgaataaccaaagttgttcctgaatattttttttaataaaaaagagctggatttttaatacgagcaacaacctgcacggatcttgaagcgatcacggccgtccaacctggcccaagggttggccatcatcattcctaacaggccgaaatagacccgccgtcagcgaaaaccggagaaaatatggtttaaactattaagcatggtgaacacttaaggagttgacatgtctggtaacggggattaagaacgccatgcatacggggggtgctgatacgcgatcagccgcgcgcgcggtcagtcaccccccccccccccagctactgtatacatcttatgtatatacgtcttatgtatatacgtatgtatatactatatatatatatataatatatatatatatatatatatatatacgaatatattttaatgcataaagaatatatacacacatacacaaagtttgtatacgtactaaaaaataaaaaaaatagaaaatacataacgtatagaaagtttgtatacgcgtatataaactttgtatacacgtataaaaagtttgtatacatgtatagaaagtttgtatacgcctatagaaagtttgtatacacctatagaaagtttatatgcgtgtataaaaagtttatatgcgcatatagaaagtttgtatatgcgtatagaaagtttgtatgcgcgtatagaaagttctatacgtacgaatacaaacttggtatatatacgaatacaaactttatatttatacatcttaaaaaaagaaaaaaccaaaagaagataaactgggaaaaaacaaaccgaccagaaaaaaccagagaaaaaaatccaaacagaaaaataaaaaccggagaaaaaaacaaaacaaacagaaacgaaaaaaaaggaaaaaacgaaaaactcgctcgcggcgcgtcgccgccccctctcatctccagtcgcgcggggagggaggcgcgcgactgatcgcccaatagcattctcgcatgcggactcgacgtaaagttgaggaaaggccggtggacttatttcggccgcagatggcaacggcccacgaagcacaagcggcccggcccatccaccgaccaagccagatgtatgggcttgtttctcacgaaaaaaacaaaagaagagaaaggaaaaaagaaaaaagaaaaaactctcctgtccccccggcagccgcggccgctgttcccttctcgatgccctagcatcctcgccgccgggaaccgcgaaccctagccctctcctccgcccttctccgggaagggaatcgattcatctccgccctccctacccgctgctgcctcctcacgcggcggcgcaatctccgtcaccggcggcggcggcggcggcgggaggtggggtgtccacgaacgaacgccgtgcgggctatggagtgatgatgccttcttctcctcccgacatgtatgaggtacggtcgaagacgcgcgcaactcgcgatttccactctgttctccgcaacttcccgtgcgaggtagtagatgctgtgctgtgaggggggtttttgattgatttcgtctcctcccaaatccaatccagaaacaggcacttgttcatggtggagatgatgagctgctggcacgggccggccctcctcccatggaggacgtgctgatgcacatccttccagttgattccgaacaggtgagatcgctatcacatatatatagccaatgtatgtaccctcgccattgcatcttttgcagagaattgcagagaattggaatcggttaagtgctttcggtgaaattgacctttttaagagatctgttctccaggtttttgctcgtgtaaacaatctggggaatgaaatttctcctgtacaagcctggtgccaaccagagctgcgcggcgaaaaggtttaacttgaacattatctgtttacctaccgcgttcatccatcagacaatgacatacataaatttggcaaaatgcagctataggtagtaacaaagacttggctaattgctttgtctcacatacatgtattacagaccagtaacaatgatgggcaaacggtgataactccagtcgagttgatcaaggtatttagaatcactttgactttttagaatcactttgtgcctggcattaactgcgaaacgaaatgcagaaacctgttgagaagcaagtgataacagaaggaagactgcagctcgctggtgatggctatcaggtatgaaaaccagacaatgcttatggagaggtttaatatggacatttgaatatggcagtgaatagctaccttaacaagaaatattcaattgcatgcgtgcagctgctatcttcaaatggcatagacaaaactgcagaacaactatacgtggatcaattagggagacaaaccaactcaatggaccaatcactgcagcatactgatggacaaaaccaatcacatgataatatggaaagcaatgaagtgtcaagcgatgatagaaacagtgatggcgattctgacagaagcctaggaaatgaatcagataaagggcttggagcacactatagtcctagtttaatggaattggataatgcaagaccaccagaacttggaatgaaatttgcaacacttgaagatgcacagagattctatgagacacatgctcttaaaactggctttgttgcaaagcgggggacgaactacaggagaaaaaagtttaccatagagtgccacaagactggcacatcaaagctaactccgaacccacagaggaagaggaagaaaaatattatagagaggactcaatgccaggcaaaggtggtagtgaagctcaataagggacaatgggagtatgcagcagtccggaatgaacacaaccatccattgtgtcctagctattcgcttagattctcaaagcgcaaacgcaggcgaaatcctccaagccagaaacagctggatgttcagagaaatagtgaccaactgacacaggcagataatcttgaggaacggttgtcgcaacctcttatttcagctgattcaaatgaagtaagcttgctaacaaaggttccccagatatttttgttttgtatacatgtgatggaagtgattttttaatgatctgttatcctggttgtacctcaggtaaacaacaaaaggatgcctagacatgcagagattagtatatctactgtagagaaggaacctgttgacaaactacagcgagctggtgattatcaggtatgaaaaggtgaaatctaacaagagtaccaataataaggtatcaaatagtagcttaacgtaagttattctcttgcatgcaggagcaatcttcaaatggcatagacaaaaatacagaacgaccaattgtagataaattgggagaccaaacaagctcgatagaccattcacttcagcatactgaagagcataacagatcacatgataatgtggaaagcagtgaagcgccaagcgaggatacaagcagtgaaagcaattcagacagcagctcaggtgatgagtcggataaggagcttgggaagtacttctatcctagtttcgacgaactgaagaattcaagaccaccagaacccggaatgaaatttccatcccttcaagccgcacaaagattctattacgcacatgctctccttactggttttgtaggaaagaggggaaccaactacaagagaaagaagtttcacttagaatgcaacaagagtggcaaaatgaagttaacgaagtcatctgaaaacccaatgaagaagaggagaagcaatcttgtagagaagacacaatgcaaggcaagggtgatagtgaaactcgataagggagaatgggagttcacagcagttcgccatgagcacaatcatccgttatgcccaagccctttgcttgcaagattcatagtagaccacaaacaaatgtcaactggagagaagtcatttttaagagttctgcaacaaaatagggtacctcctaagaaaattatgaagattttcaggaaactaagagtttgtttcggagacataccatttgaaaataaagatgagcacaacatagcacagacagaacatagaaaagcaaactcagatgttgaaagcgcattgaagcacttcacagaattgcagattcaaaacccagaatttctgtacgtaatgcaaaaagatgaggacaacacagttacaagcatcttctggactgatgcaagattgaggatcgagtatgatattttcggagatctcattatgtttgatgctgcctatagcactgatatgtataacatgccttttgtgcctattattggaataaatagccacgcgacacccttcctgttaggatgtgctttgttaaaagatgagaaagtagaaaccttcgaatggatgttgcgtacatttttgcaagtgatgggaggaaaaatgccaagagcggtcataacaaaccaggacacatcaatggagaaggcatttgcagaactcatgccgcatgtaaggcttaggttttgcaagcggcatgttatgagcaaagctcaggaaaagcttggagacttcatgacagcaagaggtaacataaatacagatctacataacttagtaggcaactcgctggtagaaacagaatttgaagaaggatgggttgagcttattgagagatacaatgcaagtgaaaaccaacacctgcaactcatgtggcaaacaagaaaaagttgggcacctgtctattttagagaagatctctacccatttattgactcagttggttccaacgagggaataaactcattatttaaaggtaatatgcttccaaaggacacaatagataagttcattgggcaatttaaggagatacaagagaatatagcaaaagttcatgaagaagatagatttcagtcaggagctgaccttaaatacatctcaatgcaaccaatagaacaacatgcagcacatatttacacaagggaaatatttctgaaagtacaggaagaactactacattctactgcattcaacgtgcaggagatacaaatagggacagtgtacagacttgaaaaggtcttcaactatgagaacccagagtttgatagaaattattttgaagtgcttgctgaacctggcatcaatgcattcaagtgccaatgtgcaaaatttacaagggatggaataccttgctgccacatattcagacttttcactcagtttggaatcaatgaaataccagagcagtacataatgcccagatggactaaaaaattcagagaggagcagctaaaacagaacaaggaaaaattatttgacaagcatggtataaaggattcagaaaatacattgagatatgcaatgctaatgagtaaagcggctgaaatttgcccgaaaatttgccatgatgaagcaaaatgcagcatattcatgcaggaactagacaagattcaagagaagttgataacggagagcagagaaaatgcacagaatgataacccatgtcgtgaacaaggggccttgcaacaggagcatcgtgggagcagtagcaatacagagcaagagcaacagcatacaggtggcttgtaaggcacagtgatgcttggtccaaaatgtgcagtgggtcagtagagcattacgggagtgagccaattgatctctttgtgcgggttctggtcttctggaggagactattttgtccaggaagtagaatggttagtatagttagtttagctgaagttagttgtggtaaacttgtctgttaggaaagtgttggtcgagagcaggaagacgtgtaaagatgcattgtatctattagctctcctgtctaaacatgcatcttggttcgcggcagtatgggaagctgatagttaattgacatctgtgttcgccaattttgcaggtatgccttctttttttgtctgcctttgttggtttcaaaatgatttagtgtgtatttgttgcaatgccatttcgttgaatcgcctgtaatatgtttcataggttttgatgtagtatgttccgtgcgctttggtcttgattgtatgatctttgtttcttatactgtttatgggtaaatagggagatgtatattgttctgtttgtgttagcatgtaaaatttcatatcattaaattgttctcgtcttttctcaaaaaaaagtcatcttctgttttgaaaagataatgcgattcaagttttttttgccattttgtgccatgccccccgcgggcgtcatgtagactagcttaaacttgctgtaaacgattcatctttctgcatattgaagaattataggtcttactttttcagtaacaagctatccgttgatttgcttcttaattataagttgatgcaaacttggtttgttagctttcaaatcctctgcttactaccgtatttttgttgatgcaatttctaatgataaataagctttcgagtcccttcctttaatagtttgaaagtaatctcaaattttagcttccaaaaattctctttccgaatcattttcacagttttattaacccgggctgttctttgttgttgcaccaaatttgcaagtctagtttgaggaattattatttttataggtaaattggaaccatgccattataattttgcaaagtttgagatatgtcatcagtatctcaatgacatggaggacccacgtgagtcaatgacatgtaggtcaggatggcatatctcaaattttataaaattataatggcatgtaggtcaggatggcatatctcaaattttacaaaattataatggcatggttccaattttccctattttgatataagggcaaatcttttcctgcaacatcaaagcaatccacattccacgctgaatacgtatggaacaagtgactgtcattgtaaataggcgtgtgtcgaattgccaggttgacaagaaaattacttgtaaatctttgtacctttttatttgacgatatttattatgaatgaggaagaatattaacggtgaatttcagggatgatatgcttgttcacattgcatattttttccacgcaaagtatgcattttttttccctcacaagtcataatactgatggatcctcttggcgttaaatgttccctttgtcttgtttaagattaaaattggatgaagaggcgtagaccttggattcaagactcaacggcctgttttggttagaagtttttaggagggattgagagtttagaaggatgaggctattaagtgttttatttggttgagagacatgggagttttggtaggatgggaatggggaattgtggaaggaactccctccttttcaatacctgggtaggggcagataattgggagggaatttctcctttactttgtctaagcaaatctcatccatccgtttttattaatgatctaatctccaactaaactccgtatcaattttcatcgcctctaccaaacaagatattgggattaaaaatcaaattctcatcttaatctcatcatcaattccctcgtgtaaactctcaatccccttctctgaagtggagttcagaaaggaccaagaagctagatctatgaaaggaccacaacaagtggcgaaaagagttcctcttttgaactcaatatcactaaaatcaactcattcaactacgtgatagcagtatgcaatataggatggcttcctgcctctactgataccagcgctgtcggatcccaaaactaacgattcagaaaccgacatatttaactgtatcaagccctggatcagtaggttgatacaggttcaataatctggatcttcattgcatacatttggtcaaggctccaaaggagatatctttatatataaaataataggacatttacaagtttgtggctaactattacagcagaagctatacgatgacccaactctatcgttttactatagaactaaaccgtctaactatactagacttgaagactaggtttaaagggaactaacttatgtgattgaactcccagctttggcaaaaactccaaatagactctgaaaaaaggggttgaagcaagggtgagtacatgccaatcaccccggccgcctgcaggctcagtttggggagaatcggtaatcaacttcagagaatctagagaagctactaacccagcttttagctatagttcattttctagattctacaactacaaaatctcataatcaactacaaaatctcataatagagtgacaatcttacagtttaaatggatagaaactccctaaacaagccttagcttggtccacaacaaggtgagaatgatgaggcataccgacatttaggctaacctcaccttccacgcactaaaacggagtaatgcttcttttgcaaaagacgcaccgtttatcaatttaaaaaacgtgcacaacacgagcgaagtgagttgaaaaaggtagggggagaaacccattagattaaggccattgaacggtcggatgcaagggagtgagtaccaccgctgccttgcaacacgcaagttggttatttagatgattcgtcttcaagaatccttgagataggaaggatacgctccgaagtttggagctcagatgaacaaagcgcattgcacaaatgatgtacgaaggatgcttcacagggctggtgtccatcatgcaaagcattcatcgagctgatagagtgatagttgagaatcggcgttctgggaaacaattctaaaagacagctctacacataccgaaacacaactagtacaacacaaagcaaaacaaaataacacaacagcatcaggcaatacataaacaggaaaagaaggatcgaaatccgggcaaacagttactctcatctcatcaagataacaataccctattggcatcagttctatcagaccccgaagattttatgcgatgcaagaaaagaagaaacgcaataccacgacatgactgagtgccaatatcatagcgtgatgtggtaccgtgaggagaagaaatgatcccatcagaactcatggaatcaattaaattttctaggtatatgacattctgaacaaatcgaggcatctttgttcaaaatagaacattttcaaaaaggcaagctgaacgttaggtgatataaataactttcccaaagcatcttctctagcttacacaacagaaagcaatgagcatctatgtaaaaattataatcactcataaccgcatacaagcaaaatactgaaactgtccattggaacatcacctaacatttaccaatgtattgtcaccaaaatcaaaatagaatcatcaaccatgccattatccccatgatataactcaatcagattgtacaaatttaggcgcagacttgtcacaaagcattgttagccagaacaactgtagtctaaaaaaacataaacagccaaaccacaatcccacaatacttgatgcaaaacatccagacctaccactaaactgtctaagctcaacactgaagtaggataggacaattacactttttttaatctatctaagatttctacaaggatcatagtgcagccactgattgcaacaactaaaagaatgaaataagttacttatagacgtcctatttcattactttgcattcggattcaaatccaacaatgcaaacaaataagcagctagccaattgaaccttaatacttgaagcataacataaacagctaacatacataacagtgcatagccaaccatgtaatccatccaaccaaagaaaccaagtgctaccaatcaccttgcacaccatgaaacaaacaaatcgatacctaaacactaatcaggcaacctatcgcaagttgcactaccattaccaaagaattgcctaagattacagttgctaaattttgatagccatgcgagttagtagacctaattaagttgcaaatcatgtccgcaaaacactgttgggcacatcgcaatgaatcaccgctggaaatggaggaacatggaaaacaaatcgcatctgaagcagtgtaattcccaaacaaaacttcaaccagatctatccttggcatgacttcataacacatgagcatcatcatgtcttaattttaaactcaatactaacaaccaagtcttcatggacacagataccaaaaaaagcagatatagattaacggatgatagcaagaacaagaaggcgcgcctagaagcggagcttggtgaagaaccacctgttcttgccggtcttgaacctctcctcgaggcgagccttggcggccttgcaggcggccaccttcttgtcgcgggtggcgagggcgtcgggtcccccggaggccacgtccttgaagtcgacgtcgagggtgtagcgggtgggcatgatgtgggtgaagttgacgagcttgaggaagcacttgaccctcgacttcttcgccgtcttcttcgccgagtccttgcggatcaccttcttcgggtacttggcgaggccggcgacgaggcagtggccgtaggggcggtcacgggtgccctcctcgaacacgcgcacgatcaccgccttccgccccgcgtaccgcccctgcagcaggatcaccgccttccccggcttcaggaacttcaccatcgcggcggcttggtacggatctccttctccttcgccggtgtggttggtcgccgccgccgccgccgccgccgagctcacctctgctgctgctgcgccgccgccggatggtgttagggttcgcggagaggggagggttttatagtcgggatgcggcgaggctagggtttgaggtggggaacgaatggcggatttgcccctgggttgcggatcgttggatgtgaatcggacgggtgtttcctgggtaagttggtggtggggccgaggtggcagtgggagattgaagggcgagtggagggggtaaaatggggaaggttgagcgggtgcgctgagatgggctttgggcggagaaataggcccaataagacccatataggccgacctatcggtctggcccacttgtcggacggacggcctttcggcgcctgttagcaaagcagcagtggttatgtacagattatttgaaagagtactgctatatatacgactcaggtggtgattgaatcttctaaagatgaagttgaagattaagtgttttacgcaaaatgaggtggtaataatgtgtgtttaattgagttttaattactacaaacttgaaaaatggattaatctgatattttataacaactttcatatagaaagttttcgcacgaaacgcaccgtttagcagtttgaaatgcgtaccgcgaaaatccaaaacttcatctagtctttgtagaggaaacgaatgtggcctcaattgtacaactcatatatataactagatatatgcaacgatagattaatcgaaggagagcatgttcatatgcactgcaaccttttacagccgtcgatcaaattcagtcggatagttgggtcatatgcatagcaatttcctatttgaaattagcatggcatgtttagataagtactaggagtatttgttttctgaatggcagatgaatttaaattgctggagtcccaagatgatgagattgcgagaagggtaggggatgaaggcatgaagctgctcgatggttttttttttctttgggtggttgtgtgctaagctgaagttctgcttttcgatctgatctgggtggtgatctgctttggatcactctgggattgatgtctatgtttgtttttctctttgcagtagttgattagttggttgtaagatagttttcgtatatgcctgaagtctcccccaactatggttggatggcacctggtcaggtcgttttcgatgttgttttaaatcctctgaattttttgtagcttccgtttctggtaatagaaatggggagagcttggctctcctagttaaaaaaaaaaaaaaaaaaaacttctgaatgatgtccagtggtgttgggttgaactagtcagtgccaccgatttttggtttgaattttagtttgatgtcagaatcatgtttatgtactagttctccaaaaaatttggtaaggtaaaagtatttatcgagcgttcagtttactattaacaaactacgcgaagcaaactaggctgttattttgcttgcctgtccctttggatgtgctcaaatttgtgcctatatttgcagtgtttctgataggacttcccttcttttgttgaaataaaacacaagttcacaggagctggaaaagatcacaagtttgttatgtactcacatacatgtaaataccactgtaaaaggagtgacactgtaaaaaaaatattcgtttcagtacacatgcacaaacatatggttggttcgtcagctaattcagtgccagctccaagctttggaatctctgaactgttggtagcattttgagttcttgttcttccacctccttgactttgttgctccacttcgctttgctgttttcaacttgttgggttgtcaaacatccgttctaccggttttcctctgctttggcacttccttgatgttttcgcttgttggagaagaggcgactcatcttctcttgtttttttttttttttttttttttgctgtctatacatcttgtgacagaaaatcccacctcatatcattcgaattttaaaccattggatatgcttcaagatttatgcagatccttttaaccctagctcctctcctcctcctcccgattcagatcgcacaccaccaccactcctccgtcctcgcgcgatcctccgccgccaccgccccaccgcgccgccgcccgcctcgccggaaggggtcaacggcgccggcgagccccctcccccttcccccctctccccgttccctcctctcctcgaggtgcccccgtcccaccgtcttccctgtctccggcggctccccgccaccggatccaccacctcctaatctcatgctttgtttgcccctgccgccgacgccggcccactgccttcctccatccccgcggcttcggcggcgccgccgccgcctcgccgcctgccggagtccaccacccaccgccagtcctccgcccacggccatccctctaagccccaaggaaaccccccgcttccccctccctcaacccccctcctaccctcaccccaaccccaaaccctaacccgccggagttggggtgtcgccagcgccggagaagaagggagcccaccggagttggaggagagaagccgatgcatgaatcttggcatgaatccaatggtccaagatctgtaagatttcttccccaaatttcattcgaatgccatatagcaatccctttttttttcatctgccttagtggcacaaacaagaacatggaggatctttaatggcatgagactatgagagtgaactgtgaattttacagaagttttgatttgttactcgcctttcaagtttggcagagtagatcacacaggtttaaaaaaccaaggctaataaaccacgacacattcaagcaaaatctctgtcagaaaccgtgcaaaactgaaccttttatgtattacgaagttgacatgctcggatagcttcggtctccttcagacaaaggaacaaaaaaaaattacagcaattctctgcttcaaaacatgataaacccaatcacctcccatgttattactactaattattgtttaattttcctttcgctctatctcgaattcattcttcgattctaaagaaagaaatcggtgagaaaccaaacaaacaatacatgagccgagccgaggtgagcgattcagtgcctcccacgcttcttcgcgggcttgcagtcgtcgtcgtcatcttcgaagccggacacctcgtcgtcgtcgtcggagtcttcgtcgaggtcgtcgtcgaactccccgtcgcttcccatggcctcaaactcatcgtcctcgtcctcgtcctcgctctcgctcaccgccttcgccttccgccccgcggcggcgtaccctctccgcgcgtgcagcgccgcgggggtcgcgcccgcggggtggagcaggaagcgcgccacggcggcggatggcggcgccgccgctgccaggcggggagcggcgggcccaacggcgagatgcgccggtggtgggcgtggggcggccgcggcgaggcggcggagggcgagggaggcggcgcgctgcatggttgggggttggcggcggcggtggcggcggtgggggtgagtgggagggtggcggctagggttttggagcgggatttgcgcgagggctggggatttttaatggcggggaagtgggagggagcgcgggcgtggctggaagattccagagaccgcaagcggctcccgcgctctactctgatgatctgatctggtcgccgccgccaccggcgtgcgtgtgcctgctttttcatttttcttttcctattcgggctttgttgggccggtgaatgcttgttgggccattgaagatcaggaacaggttagattgggggaataagtccacattgactcccttcaaagtgacccgaatctaatccatgaccctaaacggcaaaaccgaatatctcgacccccgaactattggaactggtgcaatttgactcccttggcggttttggagggctgtttcgctgacgcggtgctggcgtggcggtgttgacctagtctgtgaggttgacgtggcgcttagatggcacggaagttgacagccacgcagcgagctcgagcgatgactcgatgacgtcgtcgttgcaatgctgaatggcgtagcttgatggcggccctcgcccctaaccatcttgacaggctcgacatcagccatgtcatgagcctgccgcatatgtcgaatcttgttgttgcgatcggcgaaaaggccagagtgccggatcttattgtcgcggacagcgggaggcagcggagggagcagggagctcgttcccccggtgaggacgttgtgtcggtggaggtgaggactaggggtggaggaggtcgccggcgtggatccataaaggagatcggctccggtctccccccagcacccttaggccacgccggctcccagatcttggcccgctgaagccgtctaccgccgtccccccgctcgatctcgtcggcgctgtcgtcctctcccgcctccttgccggccatcgagctgcccgctgccgctccagaacccgccgttagctccaacccaccggcgctgccgcttcaactcccggcggccgccaccgctctagcccccgcccgccgccgctctagcccgtgctccccgcgaccggccgaaggggagagagagacaaagaaagagagaagggaggaagaggggaggaagaagaaagagataggatgacatgtggggcccacatgtcattgggccccataattttttgtgtgtgaatgacaaacgggtcccacatatatgtttttaattcaaatgccacctaagcaccacgtcaaccccacagactaggtcaacaccgccacgtcagcgaaatcgccctccaaaaccaccaagggagtcaaattgcagcggtttctatatttcgggggtcgagatatccggttttacggtttagggtcatcgatcagattcgggtcacttttaagggagtcaaagtggacttattcctagattggatcgtgaggcagcacgacaacaaacgggtgattttagcatggaaaaagtacaccaaaggtccctcaactttttatcgagttacaaaatcgtcccccaaccgcaaaaccagatttaggacatccctcaacttacaaatccgttaactttaggtcctccggtggttttgaccataattttgtctgacgtggcagctgagtcagcgtgagaccaacgtgatccccacatgtcagggtgtccacatcgtcaccctatttctttcccctcttctctcttactcttctcgtctaggactctgggtagggcgactgacggatggggaggagaccggcggggtggggcggggcgaggcgggagaggtggtccggccacaattgctatctcgcgccagttgcttatgtcgcgcgcacgtggcaagccaactgcacatgcatgcatgcaccacggtctccagtcgtgcagatgcattacacacatgcatgcatgcatctatacgatctttctttttttttatgctttcatcttaattaatttaggatgtagtgaaagttatcaaaatttctattataagataattttaataaaaatattttttataatgcaaatttaaaaactcgacatgaaagtttttaaatcggagttgaaagttttcaaatctcgagttgaaagttttcaaatccaacttgaaagttttcaaatctcgagttgaaagttttcaaatctgagtcgaaagttgtcaaatctcgagttgaaagtttttaaatctgaattgaaagttttcaaaatttatcttgcaaatttaaatttcgacttgaaatttttcaaagtttaagttgaaagatttcaaaatttgactttaaagtttaaatcttaagttgaaattttcaaatctaacctgaaagttctcaatctattagaaaaaagaaaaagtttttaggtactaattatgattagcactaatcactaatcacgtcatcattagtgctaatcacatctttgtgacgggggcagcgtacgcacgagttccgttcgcggcgcgtatgcgcgcgttaggactcccttggtccggcagccggcgacgacggtgcttgtgttggcaactttttttgacaagcggtgatcctagagtcgccaaccacctcgatctagcaaagagctaaacctagatgggttttgataactaaactagctagcggagccgatttctagataactacccgtctcgtgggcaaaacggaaggttttcaggacaaacctacaaagagatgtcgcactctcgcagcggcggcggacggtttacggcgcaaaccgacaaagatggaaaaactaagagaaaactaaaagcaatatgaaaaacgattcgattgattgattgtagattggttttttacaatgaaccggccatgtcccttatataggggttggtcttgccctctacaggccctcctccacgtccaactcggagtagaaaccaaaggaaacccgaaacatgctttcccgagcaagaaaacctcgagacccgatgaaacacagttagactcggacctgccggtcagaccggccacacaccgccggtctgactggccctcaaccggtggtctgaccgcccaacacacggcggtcagaccggcccactcgaaggaaaccggtagacttccaaattttggcaatctttcctattttaatcctaggtgccaaatttgggtgtaaacatcttggtcccagcaagacgccgtcgtcgtgcctatccatgcgtcctgccgctccagctcccggcggcggcggcgcttgcacggctccggcagcggctactctgacaatgcgtagtcttcggccggccatgccgccgccacgttcgagcccgtccccactgcagcttggtgtgttggtggtggtttgccaccggcggggacaccagaagcgcacggtggtgaagagggctgaggccaggggagactggaggccaccgctactgccgtggcccgtgctgtcgccgccgccgccgttgtccttcctcccgtgccctgcctcccgcaactccagctccagctcccgacgacgacggcgcttggtcctggcgagccgccgccgtcgcgctgtccctgcgtcttgtcgctccagctcccagcggtggcggcgcttgcaagtctccggcagcagctgctccgaccacgcccggtcctcggccagccacgcaaccgccacattcgagcccgccctcactgcagcttgatgtgctggtggtagtttgccaccggtggggagaccggaggcacacggtggcgaagacgggctgaggctgggggagactggaggccgccatcaccgtcgtgtcccgttgtcacgccctgaagtttcccccttttttcttgctttaaaaattggttaaataaatcgtccgaaaaaattgttttaattaacctagagctaaatccctaattaataaatgcattcaataattggaaagggcattatgggatttttttttcttgggttccacatgtcacaattgattaacaggatttttagtggaattttcatagccctataaataattttaaccaattaaaattcattaaccgcgatattttaaatcccaggaattcatttccctttttcctctttctccttttccttctttttctttcttgggccgtcggcccggtccatcttgcccggccacgctcaccctccttctttttgggccggcccgtgcccctcccttcctccctagggttgccgacaggtggggcccacctgtcggtcgtcctaacctccagccgcccgcgcctaggccagcaaccgccgccgcctgctccagccgcccacgtcgcccgcttcctccaccccactccgcgcctccccacgtcgccgcccacctcctacacctctcccgtacgcgtgcaagctcgcatagaggcgcgattcatttttgaatcccctctctctctcttcctccccactcccccacatcgccggcgaaatagggaggtttcccggccacgtccgccccctcccgcacctataaatcgctcccccgagccccctcaacctttttccgctctcgccacgctcgcccgtgcactccgccgctctccccacgccacacccgagcttcgccgccaccgcccatctccggccgcgcgccaccgccgctagagccgccgtcgcgctcaccgagtccgcccgcaccttggccaccacttgcttgccgccgaacgacgccggagctctgattccctcgcctcgccggtgagcccaccatttttgccccttttcggccggcgatgtaagctaccgtggttgtcctctctgccctaacttctctcctcccctcctctaggtgtcgtcgccgcctgtccgccccctctgctcgtcgggtcgtcgtcaccgccttcgcctcccgctccggccgctgtgtcgccggtgaggactcccccctccttttcttccccttcccgcgtgcaccgccgcctttggctgcgccgccgcatcggccgtgcgccgccgctccccatggccggccggccggctttgtgccgagccgagccgtgcctagccgccacccacgcttgtgtgctttgtttgtcgcgtagatttcggccgttttgtcaatccgcggttcctcaaagacgttgttgtggtctcatcagtgcgagagcaaggcaagtcatgcattacaattgatcatattgtactcaatttacaaatatcccgcatttctattaaatgttgcattcttttacaatgtcatgtggaatgagtcctattactcagccatatattgtttaccttatgccattgataatttgggtgtcaaaatgactagatgttggtttaggaaatgcttagtcatgcttagctcaagtagtacacaaatgggaatcacattattacatagactttgactattagcatagctttgtattggtgccaccgcaatggtgttagttaattaaaatacactgaatggtgggctgtgggtgcatggttttgctagtcgcacccatggcaattaaggaccggtttgctggaaaccctgggagacttaccgtgcttaccacaagcgggagtgggtaactgcttgatctgaagtatagctcgaccctttcctaggcaccggtggtgagggtgggcgtgatggagttgggttggacggggtatccggttgtccagctgccggattcaccgcggcgcacgaggggactgcccaactccggattcaccactgccttttgaggggtgggggtgaaaccttagcgtagtgtggatggttagggagggttatgcgaagggtcttttcacgatttccccctttgtagtatcatggtgatacttcggggcatggcgacgtgtcttgtgggtacagttgtacacctctggccagagtaaaactattcgaatagccgtgcccgcggttatgggcgatcaatcagattcaccgtgattagtctcacccctagtttagcttaatgaactggtgtagttcagattgttggttgggcctgttgcaacgtggtatagtgttggacagtgattggttaatactgattaattactacaattgtttttactgctttcaactactgattttaaatgcctgctttatgcaaatgaacccttagcctcctttggttatatcctgcatcatacctcctcttccggtatgacttgctgagtacagtgggtagtactcagtcttgctctcttttctcccacaccagagctgaagatcttcctagttggagctgtcttgttagggttggtttcgtcgctgccgtcaagggttgcctgtggagtggagtcgcccgttgcagaagtcaagcttccaagtttagctcgttttatcttttccgctgcatttgtaatcttttatatttttgtaagacgtggatctgtatgtcaacaattatcgtttgtataccctggctggtcctggacagggatttaatgcacattcagcttagaaattcttgtttgtgaatttctgggcatgacacctgtgctccccccttctcccacgtagccggcgccctccccttctcccgcctcgccccggcgacctcctccccgcccgccggccggctgccaagagaggagaaaagtgaaaagtgagagagggagagagaaagaaagaggggaaagagaggggcgctgatgtggacaccctaacatgtggggcccttgtgggtcccacgctgactcagctgccacgtcagacaaaaccggggtcaaaaccaccgaaggacctaaagtgaatggttttgtaagttgagggatgttctatatctggttttgcggttgggggacgattttgtaactcgatgacaagttgaggtaccttcgatgtaccttttccttttagcatggagaggcacttttgtcctgcccaattgtattaggagggaataagtccactttgactacctcaaaatataggtctaatttggttcgtacccctgatctgcaatgctggatattttgacctcccaattattaaaacaggtgtagtttgactcccttaatggttttgagagtgggttttcgctgatgtggcacgttcatcaggaaggaggaggtgtgaacgaggatgatagtggcaatgagatgggaggctgacgaaaccgtcgatgcaccattgccgactgctgtcacactcctcgtcaccatcgtgccgccgacgactgccatcactggctctccctgatagctcagcggtgtggggaaagtggaggagaggagaaagaaaggaggcatgtgggccccattgataacttagtaggttggaccaagtcaacgtgctacatgagcgaaaccgccctcaagagcagccgagagaagcaaattacaccaattttaatagtttggtggtaaagataaccgatatatgaattagaatgttggacctctattcaagggagtcaaagtggacttattcctattgggagttaatgaaatataaaagttactagggctggtttacccctaaaaagggtagaggtattctttagacagggttgaccaaatatttatgtagtgaacgtccattgatatttatcaaaatagtaaatgcctcaatggaaggttttggtttagggcatgcttagtagggctccaactcctaaatttaactctaagagtcggatctgaagtgaagctgtggagcagcctaaaacaaattccacctatttagtttattttgtgagagcactttaacccgctccgctcccttttttggtggaactgaaaccgtttgattgggctccagaactggagttggaactctgccaaacaagcccttaacaagtagcatgtaccagaaatgccaacggattgttattgacggtcgttatagaccaattccaaccgtcaatatatccaaaaataaaggagaactagcaatgcttcatgcatatttgtttaagaataatctatttccatttatacttggcaaaatattgtttgcaggagaacttcacataatcggaggaagaataaaagaaaataacatcaaagacacacctccgaccaatcagtcgcaagtacaagtattgaagggcccataggtcaggtgaaaccgccataaaatgggtcataaccgccataaggacccaccagtcagcctcctggacaaaggataggccaggaggtggggcccagggttcggttgaaccaagccgaaccgccatcaggccctttctgacaattccatgatagcttctcaaagacggttgcggggcatttctgacaattccacaactgtcatatgaaccctataaaaggagctcaccttctccactccaacacacaccaagaagaagcaatcaagagctctctctagtttatttactttgttctagtgctagtggagtagaattagaacagtctcttagtttttgaagtcttccggagatttcggataaggctttagtagctcttctctctcttgtaagacttaattcattaataaattattcttcttgtcatagtttcggtcctttacttcatttatataattattcgagtaccggctttagcttatacttgtctcgtaataattatgtagctagcttactggagatatgcaatggtattggtttaatgttcatttatatattgctctatgtgatctgcaaagatgtagagtagtatttaataatgtaagcgcaatgcttagattatcagatatcattaaatagggttatatgccacgggtctatatacaggtaggccgctgatggtgacagctcagtacgagtattcctccacatgcgtatataatataagagaatttcctggtgtgggtactcctccgtattcattaccggttggatggccacgacgggttatcgtaaggaactcgacaattaggggtggtttctcgatataccaggagggcatagttagggatattggctgcataattgtaaaatagcaagtgtagactaaaatgactatactagagttcagaaattatttttttcttattttttctccacttagtttagattattattttaataaaagtattctggttagtttcttttgtgtgtcaacctaccatattcttgaatcaattaacccatgaattagactttgatctatataagtgatataaattatcagcatagtactctcttatcatatcatcccttgtgattaaataaatacgatatataccttggaatatttccggtgaaatgttacagcggtatatccgtatgcctgcagattatatctgtaaccgtaaagaataccgagtaatgtttcaagagtcattgctgggaattactatattcctagtaatgactttaagaaatatcaacacacgccggagtgctgccatcgccgccaccgccgccgccgctgctacttctccacggcgatgtgcgtcatctactggtgacggtgaggatgacgacatgagagaggaggacaaaaatagtgatgggagtgacatagtttcaattttaaaatttttcagtgacatccaaccaataacgcgaactataatgatatttttttcatataccatataccatattcagagtaccgtggatcaaattagagtactgtatacgattgtagctgtctgaacggctatgcatgcactgaagtgtggctttccaacggttgaatatcccacctgtcatcccccccaacttatacatattcttacactgaaaataggccatttccaaagtttggtcgagtcagcaagatccatggcatagctggagtaggtatccaaggctgcacggtggcacatgcaccatgccccgacaaagtgggccctcactaaactggcacgcatacatggcccagtccagcagtagaccacagaagatccaacacgaagcagtcaggcccggaaaacaacaactcacggagcacatgaccactgggccccatccatccccttacattgttgcatgcccaacgctaaagaaacagatcaacacagcaccgattcattgtgtcaatgcctcaatggtacatgttaacaactgcacacatacatggacatatgtgcaagaaaagattgtgcaaaccttttgaaattttcagaatatttatagagatatatcatgaaagaaagaacaataaccaatcaatgaattaataatgcatatgcttccaagatgaacaaaactggcgataatatacagatgccatacatacatgtcctcacactgcatataattaatttaagtacagacaaaaattataggcttacacgtctaaccataaagaggggaagaaatggtagagaaaaataatgaacaacaataatggaatatctgcatcatcatgcatatgtgtaagagcaaagaatggtggtggtgactggtgacatggcacaacgacgacatcgatcatccctctctagctagggcttgaggcgtccatcaataatggcggcgatgaaccctagctagctatagctagttaggcctttggtgcctcctcctcctcggccttcgccggcgccgcctcagcggccgccggcgtcgctgcggcctcgactgggggctcggcctcggcggcggcaggtgcgctctcaccggcggctgcagctggctcgtcggcgggggcggcggcctcttcttctttcttctcctcggcttcttccttcttctcctcgccggcggcgtcggtggcggcggcggcggcggcggcttcctccttcttctcctcttcggcggcggcggccgtagcctccttgggcttgatctcctcctcgtcggcggggagcaacgtggagaccttctcgaaggtggcgaacaccgggccggagagcagcgccgggccgaccttggcgatcccctcgctcagttgcttcgctccggggaactctgatcaatccaccatgaaaatttcacgtagctaattaatgatcagcgaaattatattaaaaaagaatttgatgagatgtgtttgttgattatatattaccgattttggcgagatcgtcgacgaacttggtgacggcggcggagttcttcttgatcccggacaccttggccctgtccttgatcagaacctgccaaccatggacacatcaaatgtttcagtgacctatacttaattagctgtaaacttggcagatagtatgagctaagctaagctagctggctggcagtcttttactgatcactactcatatgtgtagggtacatgcatatgcatgacgcatcactgctcatcactgagccagcgagggcgactagacgtacagaacgcatgcagcatgatgcagccaagcatcgatacatcaggatcatcacttcattagttgcatgattagatgggcctaagtctcaattaccgcaaactaatacgtgcagttggcagcactgatcgagttaattaactactgaattagtaggacggatgatacggttggcgtgtgattagtttctgaattatatttaccttgagcggcgcaggagcagcctcgtagatctcgacgaccttgggctggaggtcagccttcttctcctcgaactcgccgttgatcccctcctgcaccaccaccaccacaatcatcagcatctcatcgcaatcaaccagatcgatcgaccagacgaatcaaacgacggcggcggcggcggcggcgtaccttagattcatcaaacgacttgatgagttcggcggcggcagccttcttggcgttgccgcccttggcgaagacgaccttaatcttcggcagaaccttggtcttccagtaatccatggccggctagatcgatcgatctaccactgatcggcggcggcggcggcggtggcgaggctaagcaacgatgtggttggaggtagaggagatgatggaacgtgaagtggacgctgctgtggctgtgcggcctgtggtttttgcagaatttgatgggcgccgctggggtggctgcagttatagaaatggagggggggaggggcagcagaagaggtcaggaattgcgggaatgccactggccgctaataattgggcggaattccagccagggccagggccggaggccagcagagcttctgcaggatggtgaaccgcccgatgatgattagaatgtgtgttggcctacatgaccaatttgccctccggtctacgtactgattatgtgcaatgtttattagactcccttctatcgtaaacgtgtccagattcatatgatgctaagtttagtctggaatgggtttataagctggtatgactacaagatttaagattgcagaaaccgcaggagatgatcaaaatgtgaacaaaaccgataatggtacaaagcactagtactacgtacttatggtaggtaatatatttggttttaactgttatcattacaactctacataatcaaacaattaagtctataacattattatagtgcttttactaatctttagcacggagatccaatctccgttatgtgctaattgtagatttaatgatgaaaatatggtactagcatagtactgatgtcacaaaagttatagtacatgatgaatttgctttcaattgttaccattacgggctgttcagattgtagctaaaataaacatcactaaattttagtattggcaagatgataggatttcttatgtattattaaatttggcaacaaactaaatgtacaattttttttacacctttacttaaaaaaatgatatagttaaaaatagcatcaatctgaactgcccctacatctctaaataataatcaaataactatcacaatgcttttactaatcttcagcacggagatcccatctctgttctgctaatcaggcaagtcaccagtggcaaatggcgtaaatatcccagacctacgggggcagagcgcgtggcacagttggcaggcacagctggcaatgcgctgccagttcagttgccggtcgggtctggcctcgcgcccgcctcggtgtcccaagattgatgcgtgatacgtgctgcccatccccacgcgctgacaggtgggccccacaaacgagcgcggtccccacctcacggccaccgatgccgtgcggcgctggagcgtggcgagggggaggaggcaacggtcgtgttggtggactggcgggggaggggtgggtggggcccggcgctgggacggaggagaccgccgaccacgtggcctcgctggctacgctgccgcttgccaccgtggctgccgttgctcctctcccccgaaatctcgtttcaatccgcggctccgtttccggcgccgccttggtcagattcagagtgaccgggtgacgcgtgcgttcgatcgtttttttaagcatatatactccctccatatttttttaaaaaaaaaatcgtttaaaataatatttgagtcaaatcttaagaatataaattataaataactcttaagttgttgagtttgaaaatataaaaattatatgaatagatttgtcttgaaaaatactttcataaaagtatacttccttcgtcctaaaatataaacatttttagctaaaaattgttatattttgggacggaggtagtacatatatcacttttcaataaatatttttatagaaataaaaagtcaaagttgtgttttgtagatcgagtcgctgtccaaaacgacttcaattcctttataagtacggaggaagtacattttttctctttaaaaaaacatggtaatactatcttacttttattagcgcatctgaaacaatgaatcagtatattttaatattaacgaaatcatcatgaacatctcactattggcatatgctactttttaaactgataaacgatatgccttatgaaaaccatatgcatagaagttttctaaaaattaaataaatctaatttatgagagatcactgagccaaattcagggaaccgtagttcgatttcaatcgagcagtcgcgtgtctcagcgcagagctgtgcgtcctcgatcgatcggctgctggctgccaccgttcatggtcatgtgagtaacctgactcaactttctgacagttttttcttttcttaagactctctgacggtaggaatggccgatggaatgattgttctaggtctaatgttagtacctgccttttcccttgggtcatgtagaagtaaaatcagttctgttagcagtaaaaaaaaattgttcatttgccttgtgttgttcttactgcaaagtccttgttagtctgtccacatttgataaaacaattgatttttttaagtcaatattgttcgacatcgaacaacaaaataaaaatatttaaattgatggtgcactgtattaaccttttggtctttaaagaacctaacagtgcgctagctttccttcttttcttttcgatcggatcagtgtacaaaattagctaggcatacaaacgggctaactcataaacctatttatatgttaaataaatggtaatccgcaggtttccacattgtgacctggcgtatcgcatcaagtggatcgacccttaaaaccattaatagatcaaattagtaggtaaccgtgagttaatccgcaggttgcctactaattttatctataagagcagatacaatagcaggctattagccagctgtaaacatattttaatgagataaaagatgagagagaagagcagcgggctacagatctgtagccagctgcagcacggactccaagacgcaatgtgtgtataacaggtgggaccatatattagtagtatagtaagcaactattgtatgaattggctattagattggctataaatgaattggagctagtagtggggtttactattaaatttgctctaagtaggtttacgagttgaccacttatatcccttacttagcaataggaaaagagcatatatataaacacaacaaacatgatcgagttcggtggcatgcaatgcaaggatgcagcctgggtgcatatgcatatggctggcggttactaataattagcaatgatgagtttggttacattaataatccaggattagggcgtcattagcatcatcaattggcccttccagcccctgttctgctactattagggcacccacaatggttatctatagactctctataagagatccatgtcaacatatttttctacttggaagagattaaatgaagagagagagcaaaactatctactaacttgaagatagtctatagagaaaaatgaggcaatggattagagagctatagatacccatgtagacataccattgaagtggtttactattaatctagtctattgctgagatatacatgttttatagatagcgccttactttaccattgcgggttgctcttagcagtagtattaacatgggtgtttcgcatgggttgatcagttcggttgggcggctgtggctggttggtggccaatgattttggtctcgtacagacaacggttggcatctccaacctttcgattccgtgtatatgtgcgttggattattggattccgcgccagctgttcttgaccgtggatgcgtgatgaaatggaagtcgagtacgtagtggagtatacgttgcatttggggctttggaaaccctagttggcttggctccatcgatcgatggttagctcggcggttacttgcctgggtggggggatattctgtactcctaccatgcatgtttccatctacaaaattcgaaatgaaccttcttgcgcctgtctgacacgctcacacgcaaaggtttttgcctgtttcaaacggagaagaaaatggaaagtgaggccctatttagttcgcgtgacaaaaaattttagcgtgttatattggatacggatacatatttaaagtattaaacgtagtctaataataaataaattacagattccgcctgtaaactacgagacgaatttattaaacctaattaatctgtcattagcagatgtttattgtagcaccacagtgtcaacatgacgtaattaggcttaaaagatttgtcacgcaatttacacgtaatctgtgtaattatttttttgtctattacataaatgtgtccaaacatttgatgtgacagggtgaaaaatttttgtttgggaactaaacagggcctgagttgcatactagatccggtttagtttatgctgtcatttttaatcacactaaaatgtcaaattttggtaattttggtggttttattttgttcgaacccttattaaagttttgcagagtttctaagggcgaaaccctcttaaattactaaattttggtacgatagtattgggtttttcatattttgtttgttgcaataccattggctgtaaaaatgttttgcaggttgaaaatgatagtaaattgaaaacacccttacagtacttaaaaaatcattttccatagcatcgcccttttagttttactagcaggtttaatgagcacacggttttaaaaaatacttgatggggatttcggtaaccaaccgccaacccaaaaatacttgatggggatttcggtaaccaaccgccaacccaaattaattttcgttggttgtcaattaagagatctacttgcaaaaatagagttctttttgcaagcggagctcttaagtgacaagcaaggacatagatccggatttggcatacccgcctcccctccctctcccgcatctagccagcgacagtgacagtggaggggatggatccgtcggcaacggcggcggtggtgctcggaactgctagatccgtcgccccggtggtgaaggagaagggcaggtgacggtggaggaggtggatccggcggcggctaccatgacgacagctaggccttgagaaggttccggcagcacctccaatcccctcccctctcccagatcaagcagagggacaggtggtggctcagggcctgggtggtggatctggaggctcaaggtggtggggttgccacaggcggtggagctcggtcgctggaggcaggcagcaaattcggcgatggcttggggcatgggtagcgcatccgatggcggagcttgagcatgggcagcagatttgggaaattcattttgtactcgaaaatcttttttccttgatggtcagtgtcaatgggggatacccgtagaccggatatagagggtattggggtacgctggtacaaggatctacgtaatacgacatcaagcaggcaaaaaacaaagattatactggttcaggccccttgataggtaatagccctaatccagttgatatgggattatatgatggaaaccacagattacaaagggaatagtggaactcgacgataccgacgagatcgtagtcgagttgattcgactagatcacccggcgacttggctcctgtaagctccggcttcgtaggctgtggtggatatgttggcggtaagattcgatgccttaggtcctccggggggtcccttttataccgcaggtcaactggtcttcaagtaagactcggagacatcggacccaatatgatacaatgacgacccagttctatccgagtaggactccttacatctgtgaactccataatgaatttccttaacttatgccgaaaacgtccgtatacgtgcaagtataccatatcgatatgtgacatatatcgaagggtagagggtataccttacccgtaaccctgacagtcagcttaacctaaccgtttgtgaagatggttgattttcattggtctttagtcattggtggcaacgtcggccactatagaaaacgcaaattggccgccaggaaaaaaaatccattctgtactagtgttcacctttttaccaatatatcttccaaaccaatcacaatcctccaccatttaatttttctgtctagctctatttctcaaccgatcacaacatccctccatacttaattttacctattctcttaataatcatatctatctctaaaacttattatattctggaacagaggtacattatttccgggggcatacagtacaacgacgctgcttactcacgcgttagattactgtagcagacgtattttccctattgctacagtgatcattttatgctgtaatgcagaggatctaggacgttgttcagtcgttctcatcacacttgttttataggtctataaaaatggtatagattaattatatgtgtgtttttgaatgattaactatatatatgtaaattattatagtattaatgtttcagttaggataatgaggaaaacgtttaaaaagagttaactgtccccaggacagaaaaaatggagcaaatgtaatcaaattatgttgtattttttctattgcgtttggacgaaaccaaaagcccagctcatcattaaaaagatgaaaagccccagttgtatcagctgggctgaagcttcctgattgctgctgtttaggcatgactatatttccccatcttgggccagatcaactggacttaagaccattcagggcactaacttttcaaacgcattttttttataattttttttagagaagggtattttctacccggcctccatatccaaccggatatatacggccattgagatagggaacttagccccgcaaacaacccaatttgaaattcgctccataggagatttgaactcaggacctttgggtactactcagatcactgtaacttttcaaacgcataaggaagaatctctaagaattttgtttttgtcaattgccattgaacagtaagttctatgttttgccatcatctaactaaggttttatgaaaaatgccagtgtataagccttttcttttcttcttttgtcatctacgtcagtctctcgttaattaatcttatgcaaatagaggggtgaaacagtcggaattggtagcatttctttggaaacaacgctcgatcaatcggtaattgaccatgattatcatttaaactactcagatgtagaaagaagttagaaagaataaaatttatatataacgaaaagggtaataacagtgccttttatacggaaacggtgcttggactatccggaatttccatgaccatttaatagtccatgttacacctagaaaacataaagcacttcttggactgagatacacttgttgggggtaaaatggccattttgcaactgtgttaatagagcgctattgacagaagactaactacaatggcaaaatgaggtaagaaaatactttatgctatggtattttatagaaccacatttgccgatagccaaccaattgcttattagttgcaaaacatagaattatcaaagaattaagatgttggcttttgcatgtcttggtgatctgaatcttaaactgatgtatagaatatcaacatgaaggtgaaaaaaacaaaaaattgacttcaatcctaacagagctatgctttgttaaaattagccatgctaaattttctaaaatttagcattgacaagaaaattagtaaagtcaatttaggccactaaccaaactaacccagaagttttttcaactcgatagtaatcttggtcacttggttcatttgaaaagagtgaagcgaaaggattttcgggcaatatcttcctcgcctagtactgttgtggataagatcatggaagagttgtggagttgacacgaagctatgttgatcaggatggcggtgtaaatttttttttttagtgttcacttctagcgttgggagggggtttactgtgttttctcgatttttttcttcaatagccttgcttgttactttgttaccttttattccttgcatctcaataaagttttggctggcttttgccggtccagtggaaaaaaaaatcaaccacaatgctaacattttgggacactaaatagccttctttgaagggtctattatgcggttgaccgctctgcccactccccccctctcccttgtggcccacgtgtaaactaggaaaaatacccacacatttatttgtatttacattggcccaaaaatattatacatcaaagctctatataaaaagtttatacatacaaaatagaaacattaggtatataaactttatacttaaaaaaattgacaaaaaaactttataataaaatatttggtatataaactttattcgttgatactttgaacatgtaaactttatgcatacaattttatacatataaaattttattttaaatatgatattattatatgtttgttggtcatcataaaagtaaataaataaattataatatctactattataaaaattgaagatgtttttaccgatactttggtacgtcatccatgtataagtcggttgttagttcgttcgcttttggaaatacatatccgtatttgagtcagtttttaagttcgtttgctgttagaaatacatatacgtatttgaatcggtttttaagttcgttcgcttttggaaatacagaaggagtcgtataagaaaactcgcatggtaactttagacgaacggactcctaattgcagctcattattttctaaaaatatatatccaagtgaatttccataaatttcatcttaactaaaccatataacaataataagattaaaatggattttacccgttgcaatacacgggcttttttctggtaattcaaaagtaaaaaacaaatcaaatagggtcggccttactagtttcaaaggtccaacctataaaaatcacacaaaataggacagcgtggggaaagtttgaagaaaaaaatggagaccttgcggaaactcgaaaaagaaattaggataaggtggtgtttggatccagggacttaactttagtctctgtatttagacactaatttagagtattaaatatagactccttccaaaactaattacataaatgaaagctaatttgtgagacaaattttttaagcctaattaatccataattagagaatgtttactgtagcatcatatatgtaaatcatggattaattaggctcaatagattcgtctcgcgaattagtccaagattatggatgggttttattaacactctaagtttaatatttataattcgtgtccaaacaattttaattccatctaaacagggtcttaagcagtggttgtcaaaaactgaaattccgatctgatcacaatccgatcccacacatgatctctcgctaaatatccttttcgtcctttggagtgcatgatttcattggaattttacagtgttataatttctgcaggaatcggcaaaaaaatctcagtttaagaaagaggacaatctacataattaagcacagcatgccttaactttggcatatttcacatgaaagatccgagcaaatatatgaaatacaaaaatccaacgaaaaaacaattaacgcgataataatcgatcttttctcctagaagtactcgaattcaacgtaggacggatcatcccgtggcgagctggccttcccaccggcggcgctcttcttcggcgttccgccgccctgcgtcgcgcgcgcgagcggcgagcggcagtccacggcggcggcggcgacgtccgcctccgggatgtagggtggcatggcgctcctgaccagcgcccagttgacgccgtcgaagaacgggtgctgcttgacctcggtggcgccgcggcggtaggcgagcctggactggggctccttgacgagcaggccgcggatgaggtccctggcggcggcgctggccgccggcgcgtccgggaaccggagcggctggccgacgacgttgaacagcgtggcgcggttgccggagcccttgaacggcgtcgtcccgtgcagcagctcgtacaggaacacgccgaacgtccaccagtcgacggcgctgccgtgcccctcgccgcggatgatctccggcgccaggtactcgtgcgtgcccacgaacgacatcgacctcgcccccgtcggctccgcggtgaactccagcgacgtcgccggcggcggcctgttcttgccgttgccgtcgccggtcgctgacgtcacctcctggtcattccccttctgcttcttcttcttcttgccgctccttctcgggagaatccgcgggagcacgcagccgtgcaccagtccggcgccggcaccgacacggcccgacggcgagcggaccagcgccgggctgacggagcagcggagcgagaggtcgaagtcggagagcatgatgtggccttcctccctgacgagcacgttctccggcttgaggtcgcggtacaccacccccagcatgtgcaggtactccagcgccagcaacacctccgacgcgtagaacctaagaagatcgccatgatttcagaatttcacctcctcttcttctccaactccggcgatcgatcgaacaagaaatttttacctggcggcgtgctcggagaagcacttgttgggctgcttctggcggagggaatggaggttgccgccggagcagaactccatgaggaggcagtagaacttgtcggtctcgaagtgggagtagagggtggggaggaaggggtggtcgaggaggccgaggatctcgcgctccgtctgcgcgcgggcgagcttgttgcggctcaccagcgagctcttgtccatcaccttcatggcgaacagcgcgccgctccctccgccgcggagctcgacgaggtacacgctgccgatgtcgccgtacccgagccgccgcagaaggcggaagtgtcccaggctgagcggcgactcgcgcgcgctcgccgcccggatcgcctcccacctcccgtccccggcgccgcccgtgtgccgccgcaccagcgccggagcagcgccgccatcgtcgtcgtcttcgacggcggccgccgccgccgtcctggacggacgggcggcggcggcggccatgtcgacgacgacggcgtcggcgtagatcgggttgatgctcttcctgaagcccgacggcttgtccggcgactgatccttcgccggtacgaccatcctcgggcttggcagcgtcatcgggtacacgccggcggcgtcgaagctccccgcctcctccatatatataccgccggccgccgctgctcgatctctccgatcagtttcgctccatgccgtcgacggggtgttcgtcgtacgtgttgctggagttttaaggccggagacaatgcagccggccggcagcaagttcgatcgggaggggatattgtatggatcgccatggctgggcgcgtcgtcgtggccgccactacaagaatgggtcgacgtggagggggcgaactggcggagttgaggcggcgcgacacgattgatcggttggttggtggtggatgtcatgtccgtcatcaaacgcgcgcggccgggtggccggcaggtcgttggtgacgacgaccagattgacaagtatgaggggctcaccaattggcctgcttggaagcccaccaattggcccagaaaaaccgggaatttttttatttttaattttttttattaaaagatttacaaaaataattttgtatttcaaaaattgacagaagtagtcgtccgctgccctctgggaggcaaatcgccctcccagagggcggcaaatgtgacgtggcagacgtccgttcactctcgggcgacgaccgtcaatgaaatttgcaggcggcccccttgccgccctccgctagggcgattttacactgtgcggggggccgcctgcaaatgggcggcgaggggggcatggaaatttgcaggcggccccctttccgccctgggggagggcgattttacattgtgcggggggccgcctgcaaatgggcggcgagggggcctggaattttgcaggcggccccctttccgccctgggggagggcgattttacactgtgcaaccctttatttgagaaatagatatttttataattatcaatagttatccaatcttttatattgaaaactcaatacaagattaaaatctcaaagattggtaaaatccaattttattattttttagtcttacgcatacaaaaatacaccatcataattaaacattgtaatgataagataggtaagaagtgccatcgatacacgatacaaatttgtcggtcccgacgaatctagcctgtggtaacctatcagccccttctaggttggtcaatatgcattgcattctcgtggtccttcaatcgttgatactctacttgtgtttctgactctgctatcttttggccatgatatgatggagtgacattgtcgatccaccgagtaaatccacacatccttggattgccatgaaaaaatagtaatgttattcagtttgggtagaaattttgtgcaaatcatagcagattttggaaacggttagacatacaacgaaattgttgtctacattggggcagacaaaatatctccttccaaatgtctgttctgcaaatgtggtagccacttggcagcgatctctgcacccacactttggacgctcggaccagctaggtaaccctaatggattgttcctccagtctaagcttgcaattttcacccgacgttcgtactccatccaagcatgaatgaactgtgtggtcggttcaggttacgttatcggcccgccactggaagtaactctgactgtgtcaatccattgtacgaattgacatttccttacatcctcctatgtacatccattgtggggatagttaagttaatgatagtacagaggagtgatgaaaagaatagttgtaattaccacgaaatcatcgtcgacaatgtttggacacacgaaacacctttgtcctcgagttcggtgccttacggaccttatgacctgacaacggtcaccacaacgacactccggacactcacgctacgtggggagtcctaggggatttacctgccattctaaagcctcagcagcaattcggcgttcatgctcatccttccgccttaggtagtccgatcttgtttcactacatgggtatgcacgtgttccgtcgttttgtgggttctccatgtctacccactcgatgaagttgcacattggacgatatgtctgcgtaagatgttacgattgtgtacgaagaagttagtttttatccatttgaacttcgaatagatgaatcatacctgatcaaagttcgtgcattggaagaatctcttgccccgagtttgtatcatgagggaagacttgagtatgcatccatctccacaatcgcacaaaggacggtcacaccatggtagaaaccaaccagcgaaaggatcgcttcgccagttgagacgctcaagtaatggcgcttccattctcgttaggtgtgtgctagttggaaagaagatatgaagaggttgccttcagcttgttttcagtgcaatatttgtgcacttaatgatatacattattcattagatgtgacaagacgagcacgcgcgggcgtgattcactttatgtcagcaggcagcaccgaaagttgatagtgactactcgagctggcgcttttcatgtgtgctgtggtggactgtgcagctagtggatctgacactaccgtgaagcgccgaaagtgtgttttcgtgagcataagttgttctagcaccatatgaatgaaaacaactatataggcgagagaaacacaagtagtactgcagtagtaaaagcaaaagtagtactgctttacatatttgtaagccaaaagaaagggtcacataagcactgaaggtgtagaacactactgacgaggcctcttacccctgtccctcctaccctgtgccctaacgtgcccctaggagtacgtgagtcggtccggtggtatggcacggccaacccgtcctgcctgtataggtgtgacctttggctgctcctgagtgtgcgcctctggagctcctccaagctgagaggagcctagtatgtcgtggtcgtgcgcatcgtgcaagtcatcgtcgtagaactggctagtaggaccagaccaccggcgtgagaggaagaggcacctgtaccgaagatcccagctggaaatcctgctggacaaggaccatcagtttcatacaggtatttaatagtagtaacaaaaattaaagtaccgtgtgggcgagggatcgacgctccgtgagaggaagaggtggcgaacgcgccggaagtgctggcgaacgcccctgaagagctcgcgaaagcgtcggtcgtgcttgcaaacgcgctcgaaggcagacgaggtcctgcgatgatggaacgtgcagttaaaacgtggtgacgttttcgtgcaaaaactgaaacaaaaatgaactaacctctaagctgagcagtaccatgcgaaaccggtgctgtaggtcgcactgctccgatgctaggggcgctcgaaggcaaacgaggtcctgcgaggatggaacgtcaagttacgacggggtgaggttttcgtacaaaaacagaaacaaaacttaagaaacctctggtctgagcagtaccgtgcgaaaccggtgccgtaggtcgaggtcctactccgacggtaggcgcgcgaggccgtggttgtaccagaccagctggaggtacgacgtccacggcgctgcgtaaactcaaacacgaagtccgggtaatctcgtctcacctggacgtgagcgtaacgacgttggaataaacatgatcggaattagacatgttatgtgatgataaaaaaagaagacgactgataaacttataacgcagcaaagttccactaaccccacgtcgacaccagtaagtccccattgtgggaccgtcctctagccacttcgcgctgcgaccaaccccgtagggtgcgctgtccaccactggtcgacctatggcaaacctcttggctacccaaagctgaagcaacataggacaaccagcgaagatcgctcccgcgtcggtcttcgtgcatgcctcacagagggcacggtacgtggctgttagcacggcagaaccccagctccactgcggcacgtcctgtggctgagcatccgcgatggaccgtgcgtagtggaccagccagcagtccatagcgtgcccgtgggtgctagtgaacatcacccacccgaacaaccacagcaggtacgtctcaagggagcgtcggaccgagtaatcatcagcgtcagggtggagatggtccgcctacaattaataatgaaatgttactacaaaacaatttgttgatcacaaactaagcatgtatgataataacaagttatttacttatagtgaactgaagcaaccaagccttgctaggcccgatggtagagtacgggggaagggtgttgggcggtcctaggtgtggaaggcgcatcacgtgctcgaagcacgcggtgatatcctccttccagccaaaaacaccgtccatgggaccaactggggctcttgccagtggtagcccgagcaggtacgacacgtcctgcagtgtcggagccatctctccacagggaaggtggaacgtgtgcatctcaggtctccagcggtctaccagagcggcaaggagtgaccggtctgcatcccactgcttcgatgggtcacggtcgtccgccgccgcctcaacaagcctacaaagtggtagaaggcctgccgcacgcaacctgcatagagcaaactttaaacataagtacaagacaaagcacagttgagttgaaatgtgcttacgtaaaattgaacatacgcgtactaaggaacgtgacgggggtcgacacgcaaccactcgcgtgacgtgcgtggacggaaagtgccgagctgtgcaccctagactactgacaggaacgagcggtggttcctgtcaatcccacggttgaacagcgccggtgtgtcgtacaacatacctgtatccaatagattgatcagaaacataaaaataattagttcaacataactaacaaatgttcataagtgaattactaacacatattaaacaagagtaaaaacaaacaaaagggtcacaatacagaatatttctgattacaacaataactgcagttacacgatatgagtacttagtccgaacactcatcacgataacattatgatacaacaccgaagagttcacaatactactagtacaacaatagtcggaagtactcattacaacaacattcattgaaattacacgatagaagtacttagtccgaacactcatcacaacacaatatcattttatttcctaattcgatagcaatgttacaccatggaattgcctgctgcacgacgacgccttggccttgcgcgcctgcttgttgttccttcaccaggtggttgccttccatcacttgcctgtccagatggaccagcatccgcgccacttggaacttctgcattcttcgggcatttcttgtaagtatggccgcgcagatcacacttgctgcagcataaagtcctcccacctgcttctgactcatccatatcatttctgatgcgtctagtttggcgtcgaccctttttcacccttaacttagatggatctggaatataaaaaactttggcacttagcgttgtgtaagatcctgagatcccgaacccatatatctcctcactccatgtatgaaagattgcttctttcctgaaataatttgagacgtacacattgggagatatgccacaatcaccggcagcagcaagaacgtgtgagcaaggaaggtgacgaagcttcggcttcatacaactgcaggtacatccaccatccgccttcaagacacattcctgcacggcttgcttgcgatagataccacgcctgctcctatcaacacacattatttcatacttatgcacttgtgtgccttgagcaacaactctatgtctccgtgcctttttgattttatcttccatgtactttgtcactacgttgccaaacactatgttgttatcggccatggacggaccaattttcttgtgtcgatccctaaagtaggcttgcgtgccgtgaaggatgaattcaacaatagcaaccaatggaagtacccgaactcctcgcattacccagttgtacacccccgccaaattggttgtcattatgccataccgagatccatcagtgtcgaacaatagagaccacttctccttaggctcattctcaatccactgagtgaaatttctgatggacgaccccgacctccttctcattgttggtgggtcatcatgtaatgcaccaagaggtatgggaggctcgtcaccttcaacttgtggtctgcgagattgctcatctgtttgcttcgttgttaactcatccaacttgtcccacaactcattaaatttcttctcttggttctgtgcacagagcctcttaaagagctccataagatgcttgttcttgaattgcttatagaaatttgcacccatgtgacgcatgcaccaccgactccgaacatcaggccacttagctggaagtcccttctcatcccaaccgttctgcaagtagtcaatagcccgcaacatacccgcatgacgatcatgtataaggcaaacgttgggcctcatacgcgccactgcaatgtgcactctctctaggaaccagtaccagctttcagtgttctcactctctacaaatgcaaaagccataggtagaacctggttgttcccatcacacccaattgctgtcaatatctaacctcggtatttacctgtcaaaaatgtcccatctatgcataggacagatcgacaatgcacaaaagcattgatgcaggcacccaatgagaaaaaggctctttgcagcacactctttgttcgatcatcagccgatgtaaatgtatgtaggtcatagtaagtactattattcctctgggcaatggtggctaacagactaggcaaattatcataagaagcttcaaatgtgccatacctcatctcaataatcttttgtttggctctccaggcttttgcatagcttatggtgtacttgaatttgttctcgatgtggctaataattgattttggttcaaagccaatgttaccaacaacactactgtacatctcacttgccacaaaagctgaagtgatgtttcggtgatacttctccaccccttgtaagtagcactggtgcttggtcacaatgctaactttccaataatcattccatttacccttatatgcatggacacgccacggacaatcttccttcatgcacctcacttcatacacataatttgttgacttgaccaccctaaactctctctacaaggaaactgcccaatgcttcactgcctccttcatctcatccttatgagcatacctagcaccctcaattacctcgttctccttatactcccagggtacatgatcaccatctgatataacaagtccaaagaagtcctcatttgcccaatcagtggccattacatcaccttcctcatcggatgatgcgtcgtcctccgcttgctcattatctgaatcttccctctccatttcatcaacaattataccgactatctccccctcatccgccatgcccatggcctgctcctcccttgtttgattttcctcattttgcatcgatggtccaacaacatcccctgcattgctagaaccctccacatcttcggtttgcattgaaacatttgtatctttctcttgtaccgacacaaatataacgaggggccatgaccattcaaaagccatttccacataccgtctccaagcagcagtgctgtccatcggcattagttcccaaaaataaccttctgttgcacgactcactacaatagagatactgacattgtgtagacttcttggtctattctaaatcctctcaacaaccaactataaattgactgaaatgttctctccgcaggcctatcgatgcccttagatgtcattacaaaatccgacagatcagcaccatctggaccaaatctaagatttccttcaccgtgaactatatgaaatgtgaccttatttgatattgtgcctgatgaaaacaataactacgttaacctcgcatttctgtactacgcactaagttacattctctacaatattgttctccaaaattctaaaagtaggttacgttttccagatcaaactaaagtacatcttacaattaacactactgtctatgtctcaattcatactattatattctgtgctctagatctacacatatgtgctgtgtgctacagatatgctaaaatatatggaactaaaactaaaacgcaacatatagtactcaaacataatatattagtacaaatgcaaaagaagtatgggagcaaacctgtgatgaagtgagcaaaccagtagggcttcgccgctccccttctgctgccatcccctctctctctttcctttttttttggatttttacagattataatgaaattttagagaggggggacggggttatataggagagaggcaaaaatcgccctcccccagggcggcaagggggccgcctgcaaaattctaggccccctcgccgcccatttgcaggtggccccccgcacagtgtaaaatcgccctcccccagggcagcaagggggccgcctgcaaatttccatgcccccctcgccgcccatttgcaggcggccccccgcacagtgtaaaatcgccctagcggagggcggcaagggggccgcatgcaaatttcattgacggccgtctgccacatcacatttgccgccctctgggagggcggcggcgggctactacttttgttaatttttgaaatagaaaattattttttaaaacttttaataaaaaaaatttaaaaattatgggctcaaatttctcttacccaacaaggaaccttaaggtgcttcgatgggctatataacccactaaagttatgggcccttttttttgcccacacttttttctcggcaaaacgtcgggcttaggccattgggcccatctcttctggccgtcaccacactagatcattctgtgacaaaattaatccaagtccctgttctttcgagcttatcacttaggcccatttgaattggaggaaaaacaaatgaattgaaatcctatcctatactaaaaacaaatgaattgaaaaggaaaaatgtaggaaacttttctattcctacgattctaaataaaaacgtagaaaatctagcatccactttaatctcttggaaaattccctttgagtctatctctcacatctgatttgtgcgtttatcctgcagtccaatcaaacgaccatttcttagttttccctgtgttttgcaatcctcagttttacacttgtattcttatcagaatcctgtgtttttcctattcatttgttttttcaatcttgccattcaaagggctctcggagttcatgtgcgtttttttttttgcaggtaagttaattaacagatagtctggtactcctatgtattttaataccattttatacatactatctataaaattaaataataaatatgtaaatttattacagataattgaactgttatacgagttgaaataaaaaaaagtacccattggataaaattgccaaaaatatgggcagtccggtaagtcactttagcaggattgggtccggtcgggtccggtctaacaaaaaaaatatataagatttatatattgatttattatagataagggagatagaggaaatgcactaaaattcccaaatcaatttgtaaaaatgttaaagttcctctagaatatgaagcaccttttcctatcatttgaaattcttttgaaccaatttcaccatccagaggctctcacagagaattttcttttaaaattgaactttcctacagatttcttcaaatctaatggagccttaaatagatggagagcaacaactcctccctaccctcatgcgtgtgtaatattaatgcattttcataacacagattaaaaaagatgatccataagcttgctaaatcatactggaaatataccatgcgtatcctggtataaacctcgctgctaatgcgtttctctcgtaaaaactttaagttgctttaaaatatcagtaaatcgatttgttgaatttgtaataattaaaactcaattaatcatatgctaatggttttctcgttctaagcacgtgaaaaatagataccacttgggtgaaatcatataactataaaagcaatagcagtgcagctatggcatttgaggagccaaagcaaccagctagactaagaaacaccctccacagtgcatgtggtatattttatccttcacagtacatgataatgggtctcacccgttctctctcttaacttttcatccctcctctctctctctttgcctttccccaccaaccactccccctcctccttcggctactccaccgccggcacccatctccccttccgtcgctctcctaccactcatgtcgacggatcgaagcggcaacaagctcggcactgcgtacgtgcgtggatggtgaggagcttggggcagatttggaatgtcggcggcttggcacgtccttctcgatgacagtgcctaggtggagaggtggccgagtggcgacgacgctgggcggagcggcgatggcattgggcgaagcgacgagggggcggccggatccagcccggggcagctccccttctccactatctccagcataactccccttctctgaccgccgcagcagctctccctcctctccgccgctccccctcccgcctgcgccgctcttcctttacctctccgctgatgctgctcaccccaccgcctgctaggtggctcgttggctgcatgcagatggtgacagcgggctaggcagctcatcgcaaggacaatgggctaggcggctcattggagggcaggggtgaagcctggatttatggttaggagggtgtgggcagggcgaacaagtcataagttatagtaagcaatgccgacgataaaacaagacatcatgtgttctgccataaaaaacttgaatttagctttttagctctatcattggatgtttgacagtttgagacttgagacaccatgctcgatagcgagacgcaatgggagtacggagagacgtgtgaagccgaagcaatgaaaacgaggagttgatttgcgttgtctctccgtctctttcttattaattaattttctatatcatatttattgataatggactaattaatatgctaatgcgctagttagtataatagggagggggtgggatgggggtgttagccccctccggccctgttggatgagggcgagcacaggaaggagcacgatgctactcgctccacagcgtagaagcagtgctgtctcccagcctcacgcgtcctctttttcacccaagaaccggtggtattctttggacacgagaactttattttggtgggtccggaagcaaacgtgccaagggtcaagggagaatgccactacaccgcaccgtgaatgccctaacgacacctccctcccatgcaaccgatgcttcttggcatacataatttagcaggatggtagttgaaatttattatatggaatatctcattggaagtaattgtttttctactggctagatcatctttagcatggaagataacacacaacctcacataaaaaaccgaaaactcgaaaaacgggaggcacacgcacgagtacaaagaggagttcgaaattgtgaccgtgtgtgttcacttcacagggcgcagtaatttttcttcgaccgcgactcgacgaacaaacggacgccacaggataattttcaaaaaaaaggaatatccccacccatttccaccatcgggccaccggtttgccggcggccgacgtggccggcctcgcagcggcacagccgcacccatggccgttatcccccaagcccccaccgccacacccccgccctacaaactcacctccacccccacccctcacccactcgccgcggcacaccctcccacccccacctccgcctccgcctccgcagccatgcagatgcaggcggccaccaccaccaccgccgcgcgccgcctcgcgccgaagccgcagccgcaggccaaccggtgccgcccctcgagcgtctccgtcgtcgcggcggggaggtcccggaggaggagcgcgcgctcctccctcagggcctccgcctccctcgaccaggaggtcaaggagcgcgcctcccccgccggtgagcgctaaacactctcatgactgcaaacctcgcttgcttgatcagcggaggggggtttgtgcgcttcggaggtagggctaggcttagcgctggatttttggtgccgccatggttgggttgctgattagtatcgtgaggtgaggtgaagtgctgtggttcgctttgagtggggttggttggggcactatgcccattgacgcgagttttgctacggcctcgctgatcaagtgcaatgagcacagaatgtgtatgctggtgcttggtagaggttgcccctccttttttttttttggtcctggaatgagttagcaatctgtaagtggtatatataattgggtgcaatctgattctcgctgtttagaattgggtggctgcagctgcataggatgacatagttgacatttcgagtatagcaattgtggcttcacaagctgagtagctccttagttgtaactgctaacaaatagatggagggttcaaggtctcaaacacttcatggaatgtattttgtgatttgctggctactcttgcatatttaatcgttgaagtttgttgaatgtgtttattgtgtgaaagctaccttgcctacattttagtttcacaaatacactatatcttccttccacattatatgtgcactggcttgacctagtgccatcagaacgactggtatttttcatgcatttatctatctatacatatcagcttcctgtcttttctgttatatgatgctaatctatgtaccatcttttcactgaattattcagctgggaagagtggtcaagcaactagaagagatgtgaggaatatagcaattgttgctcatgtcgatcatggaaagacaactctggtggattcaatgttaaggcaagccaaggtacattctagaagcttcttgttccattctgagattaatttcaaaattttaatgctaaggaaagctttactctgtagggaagaatatgtacttcatgaaaacaccttagaacgaacgacaaactatttgtgaaaattatttctgttcaaccacaaggttgtgctgaaaatcaatagtgcatttaccatttctgttgctgtttaaattatgcaggttttccgagacaatcaagttgtacaggaaagaataatggactcaaatgatctggagagggaaaggggaatcactatacttagcaaaaacacttcgataacttataagggtactaaaatcaacatcatcgatactcctggacattcagatttcggtggggaggtggaacgcgttctcaacatggtggaaggagttctcctagtggtactagctactgttgcggttaaatgttatataagaagattggcttacttcttatttgatgcttaaaacatattctattggcttcttttgcgcttcattgttcaataagtgttttgatgccatcacatcttgacatgccttatgtctatcaaaaattgtaacacactgcatatagggtactgattccatgttctgctgcatgctacacaagttcctatggaactgatttttcaaacagtgttctaatgtgaattgagaaaacgagctaaaatcattctattaacataatcctctatgcttcgtaggttgattctgtagagggacctatgccacagacaagatttgttctgaagaaagctctagaattcggacatgctgttgtagtggttgtaaacaagattgacagacctactgctcgtcctgagtttgtggtgaattcaacatttgagctatttatcgaattaaatgcaactgatgaacaggtaaatagttttgtccatacttttgttcattgatttgttctcttcctattccttatgttcttgttttgctgcaatatgtcagtgtgattttcaaacagtctatgcaagtggtattaaagggaaggctgggttatctccagaaaatttgggtgacgatcttggacccctttttgaggcaatccttagatgcataccagagccacgtattgagaaagacggtgcactgcaattgcttgtgagtaataaacttggggattatattgtcatgtacttaacttgtggctatgactttgcataatactttatatgcagccatcgtgattgttttcttggatgcatctgtaatttcggattttctctcaaaatggcaacttacacactgtatcactacatttttttcttctgtttgtttcttactgttattttcaactatggtaaagcttgaactttgggatgcttaactccatacagttgggagtaattactcccaagatgctgaaagccatgccatggatactaggttatgtaattatagttggaaatgactgaaatctgatagctaactagccaagatcagcaatcagtatcttgtgtacttggacagctaaggaaactcctacatgattaatattcaccgatcaatttgcaataactgccacattcgtaaatgaacatatgttcaaatttctaagattattttccatgcaaagttacatcaactagtgttgaagtctagacacttaccaggcacataatatgagtacgttagctattttgttcttctctacatcactttattgtttgttagaaagtttgatttgtcttcttgtgagcaaatttctgcggagctgcctttctgactttgacaaatctatttttctgataatagattatcagaacttctctttcattatttgtagtcctgtgtactaattccacaatgctgactgatgtataggtgtctaatactgaatatgatgaacataaaggacggatagcgattgggcgactgcatgcaggagaactgcagcgaggcatggaagtgaaggtacaaatttgttctttttgtgcatgtagtgcaaatgccaatattccaacaaagattaaaaagaacaacagggtagcatcaaagatatgtgcaacctttccaaaatttagatttaaatctctcatactctttgcatgagcaaccattgcagtcttggttaatggttcacttttgaagtttctttagatttgatctttttttcaaattacatctaggcacatctgtcaccttttttttgtttgcaagacaaagggaaaaaatatcttttcttatgacagcaatatagcttctactgatttcaagatattttgcaggtttgtacaccagatgatgcttgtagaattagcaaaataagtgagcttttcgtttatcagaacttcagccgagttccagttgataatgttagtgctggtgacatttgtgcagtatgtggaatcaatgatatcatggttggtgttttttaacaatttattcaagctttctggtttacatttatcttaagagcacgataattataaaatctgttattctttgaactctgcagattggggaaaccatagcagataaagtttctggaacacccttgcccaccatcaaaatagaggaaccgacagtcagaatgtctttttccatcaacacttcaccttttgtcggtaaagaggtatggataaactccattgtatctctactgtctagcagtctagcatggcctgcttgaaaaagagagttgaaaaatgcctaagctagatgttgatataatgctttgaattcaaatgataaaaaaaatcgatgtctaaattgcaactatgtggtcattccaagttgttagactaaatattattttattttgacaattgaaatgatctgccattgctggatgcttagaaagtatcaaatcatgattgtagttcacagaatgcagattttgctctattgtgctttaaagtggcatgaagtgaatgctgtcaaattggagtcaaattaaagtgccacaaagtgaatgctgtctcaaaaaaaagtgaatgctgtcaaattatattcaaatctcttttgtcaaattgaacttgtttaatctaaaatcgattgaatgtcttgccttcttgcaagttatttaaattaagattatccatagtggcacttttccaccacatttgctgtaatggtaccaatgccatgtttgtaaatataatgttgctagttttcttccttttctggaatgctgaaatatttgtccgttctcactggatttatcacaggggaaatatgtcacaagccgtaatctccgtgataggttatatcgtgagcttgaaaggaacttagctatgaaagtagaagacggggaaactgctgatacatttcttgttagtggcagaggcacactgcacctcactatattgatagaaaacatgtaagcatttattatcatattcagtgattccagaatgacatgtacttctggcattttcttgaaagaacctcaattgctaacaggcggagagaaggatttgagtttatgattggacctccaaaggtcattaacaagacagttgatggaaagctgcaagagccttatgaggtatgtttcttttaatgccagtattcacttgtatatttcaccaagtagcaaggtgcctgcatgttgcaattgcaacgagatcttgaaggacgggccgaatgttcccctccatgcttcagcgtagttcacgtttagttttttctgtttcggtttttcttggtgagcagttttcaggtgcatgatgcatccaccggtttattttagatggagttttttttttgttgcactagtggggatggtagggatcgtcgaacggacaaaactcccctttagaatagtagagatttctcaacaaatattgtctttggcactagtattgctattgattttactatcctacaactcctaatccctcagttttcatgtaaccaacttattcttgctactgtgttccagatagctgctgtggaagttccagaggaatatatgggttcagttgttgagcttttggggaaaaggcgtggacaaatggttgacatgcaacctagtgggttcgtaccacactctaattccttcatatgcttgcaagttatgttggaacttttttttggaggagagttatgttggaactttttaatactatcttcgcaaaaaagtataaatttcctattgaattaatcaagcaaccaacaaacaccatattgaagttagagtgtaaaagtttatgcatcgagtctgtctcattactctgagaactgcatgactttcctcaacattttatacaagagtgtactaagctgtcgtgtctcggagtaacttctgaccctcttatatcaattaaatgcaagaacaattgttgggagtggtttatgtattttcagatggtggttgagattgaatttttggatggattatttgtatggtttgaagcaaatatcttactctatgaagaaatcatgcagtaatggatgtaatgaatacaatatggctttgaaaattttctgttgcataatgcttattcctgagatagaggagttgttgccataacaagtgtcattttcaaatggcaggccagagggaacaacattactaaaatacaagattcctactagaggcctcattggactcaggaatgcagttttgacagcatctaggggcacagcaatactcaacacaatttttgacagctatggcccatgggctggagatcttagttcacgtgatcaaggctccttggtacacattactttcaagtttcaagcaacaagttttttttcttccgttttcatcaacatctaaattggataacatggtataggttgcatttgaggatggaagtactacatcgtatgcacttcttaatgctcaagaaagaggtatactatttgtgagtccaggacaggatgtttacaagggccaaatagttggtatccatcagcgaccaggtgatttagcaattaatgtgtgcaagaaaaaggctgcaacaaatgtccgctccaacaaggaaactacaggtaaaattttcatctgcaaccactattcgttactgcgattatattatttggtagaaatatctttttattgaagaaaattaggtactggttgttttctcttgtgaatagctgttcaactaaaccatagctagcttggtccaactcacataatccatgcctttcttgaaacctacagttgatatctccaaaaagttcctaggttggggttcctgataagtaaacccttgcatcttgaggctgggcaggtctggctggaggggctttagtgctttactgcctattgacctgattgatgcaaccaaaacatcataaacaggctctactttccctgagtgagttcgaagccatgtaagcaaaactgtaacccatgtatgcacaggctcgtggcagcgcaggggtggagccagccttgggccaaggcctgggccagccaagcctagcatgtttcggcccatactgggcttagcatggtgaaatttaatttgagcctattgaacttaaggcctaggctctgggccatagcccaggtgagccgatctggttccacctctgtggaatcatattcccgtgaatagagtccaacaaacactagtattagtgcattacattaccactgcgatcacagtcaccattttcttcatgccttctgacttgggctctcggaacagcctaaatattgacatgcttctcccttatcccattggataagctgccttcgttcacctttgaattcacagaaatccttctatgcattgcttcttgctagcaatcctcttgcacctgtgatctgcctgaccaaagcttaggaggcaacatgggaagcaagcagaggagccctgtgctctgtactccatgctgttaacctatatcttcctgggcctttccacatctgtgagcctgcctagctggctttccattgatttgttacataagtttcacatcaactgtcaaactcccaacttttgatagaaagacgattaatttccatccgttttggtatgctgcagtggttctcgatgaagcgttaagctacagtctggacgactgcatagagtttattcaagaagatgagctagtggaggttactcctgcaagcatccgcatgtgcaagaacccgaaagtttcgaagaaaaaccgataatgcagtggaggttactcaagcatcctgcaattttttggagctgctttgctttgcaagagcagactcagatataagattactcaattttgcaatgattataagttgccaaattattatctggattcctcattggacagagaagctttgggtagtattctaggctgcagatacatattctttcacagcgatatcagctgtgttacatgtttgtaggccacatagataccatatatacaagattcatgcaactatactccttgcaatgatctttacaaccaattaatggattacatatattactttactgaatgctcttgtgtacaatttgacattgtcaaactaataaagaattctctactcttctgattgcagagttctaacctatatacttacgagctcagctacaacagatcagagctcagttaaaacatggcgagagccagcggtttcagacgccgccgttcatcagtaatttaattacaacaactaaagcataaactaattcatggcagctgctgctttgattccttgtcagcaaccttgcccctgcttcggcaacaaacaatgttgatcttcatggattgcagcctcttccccctccagagctatggagattgatttgcgaccaaaccagccatgatattctgcatctcgacctcatcgaagccatcgaggaggccatccggcagcagctgctcctgaccaagaaactgctgagacgacaacgacgtcgtcgtctccgagggttcttgccacgatgtgagatctccatggaagtagtgctgctgctgctgttgctagtcgtagcaggcgaaagcgaattctgcttcttggttgctctgctgctgctgttcaggcatgatgtagcactggctttcctcgcagtacgcgtattcttggtcgccctgctgctgtgagatctcgccaaagccgtcgaggaggaggccatcaggcagcagctgttcctgaccaagaaactgctgtgatgacgaggacgacgacgtcacaaagggttcttgccacgatgtgagatctccatgtaagtattgctgctgctgctgctgctgctgctcgtcgtagcaggcgaaagcgtattctgcttcttgattgctctgttgctgctgctgctgctgctcgtcgtagcagacgaaagcatattctgcttcttggttgctcagctcctgctgctccggcaagatgtagcactggctttgctcgctgtaagcgtattcttggtcgctcagctgctgctgctccggcaagatgtagcactggctttgttcgctgtaagcgtattcttggttgctcagctgctgctgctccggcacaatgtagcactggctttgctcgccgtaagcaaattcttggttgctctgcgtcatctgctccaacgccggcaagaactgttggtagttgctctgctcctccgccggcaagaactgatggctgctctgctcctccgccggcaagaactgatggctgctctgctcctccgccggcatgaagaactgttggttgctctgctcctctgccggcaagaataactgatggctgctctgctcctccgccggcacgaagaactgttggttgctctgctccgccgccgcctccgggaagtattcctggttgctcatctgctgctccgggacgaagcactgctgctggatttggtcggtgtaagcagcgtattcttgctcctcttgattgctctgctcggattccggaggaggtgctgcagcggcggcggcgggggggacggcgtcgtcgaggacgaggacgtagccgtcggggacgcgcttgcggttctggccgtggccggtgaaggcgatgtgggtggcccggtgggaggcggcgacggcggagccggcgggtggggagacgatgtactcgtgcatcacccacccggtgctgccgctccggcgatcgtcgcggtggaagttgaggctgaaattctcccacaggaacgcctcgccgccgggggccaccaccacctcacctttcccctccgacctctgcttcacccacttgccgccgccggcgacggagcgcacctgccgggccccatcgccggcacccatcggggcgacgaagtaggcctcgtcctcgtcgccgcggccgtggcggtcgaggaggatccacggcggcagcggcaggccccccaggtggtcgtcctccacgaagacgaggccgcggacggggagctcgccgtcgatcaggtacggcaggaggaagagctccacgagcatctggtcgctcggattgaacttgaaccccggcgagagaccctgcgacctcgccgccgccgccatggggctcctttcttgatcgctcgcagctcgctcgctcgctcgccctcgcgattagccctagctagggtttttgggagagaggcggtggccggtgggatttagtttgcgggcaggaaggatgtgtttgagaaggcgggggcccggtgtcggtgtctatataaacgcgctcgcgggctgcgggattgggtctccgagtccgattcggccttgctgtatgtttagggccgttactgggcagggagggattgggccaaatacacggggaacggcacatatgcgaaggtgttttcttacgacgagagaattcctaagactgctggaattatactccctccgctctataggacgtgcacgtattttaaaatttaatttttataatatttaatcaataattagtataatataaattttattttattttctgaaaataatatcattgatatttcaatttagttttatatggttataattttatatagaagttattttggagatcgtgctaagtttgaccgtgcctatattatggcatagagagagtaccactgaatatgtataaaggatatttttgtctattcttatctcgtgatttatagtctaaggctgtgtttagtttcttggccaaaatattttttgaagtatatagacacacatttaaagtattaaacgtagactaataacaaaacaaattatagattccgcttgtaaactatgagatgaatttattaagcctaattaatccgtcattaacaaatgtttactgtagcatcacattatcaaatcatggcgtaattatgctcgaaagattcgtctcgcaatttacatgcaaactgtgcaattggtttttttcgtccacatttaatgcttcatgtatgtgtcaaaacattcgatgcgatgtttttggcaaaaaaaaaaatctaaacacggcctaagacgaacgatcgatgtgcttattttcatgtaagcaactatattgccatttttgttaactgtgttgtaatatttgaggatgaaggaggttttgtatgaataggattgatgctttcactactactctccatcccataatataagggattttgactttttcttgtactgtttaaccactcgtcttattaaaaaattttgtgcaaatataaaaaacgaaaagttgtgcttaagtactttagataataaattaagtcacaaataaaataaataataattttaatttttttaaataagacgaatggttaaacagtacaaggaaaaaatcaaaatctattatattataggacggagggagtatatcgataccctttatcagtaccagttggacaaaacccaaccctgataagttttgctactctttgactcgcatgctcccaattagtaccgaaatatatggcatatccatgagacccacatcaatatcgattcattaaaacaattagggccgttttggattgaagccaaaacgtgaccttatcaaaattttagtaactttaatagtaaatatgctagtttggattgaagccaaacaattggtagtgtccacgctcaatttggctacattctaaaatcttcttcactctcatactaaattttggttttatattggtattaaaccaaacatagactagctaactttgccctaccaaaaaattggtagtgccaaaatttgcctagattttggtactactaattaattggtatggtagagaaccaaataggccctaaacaacactgataacatcagtgccggtacttctaaactctaagccgacgtgatttcagttttttaaaaaacgagaacagcccaagccttatccctcgatctcttcgctctctttctcttctattccccattctctgctctctcgctctctactattcgtccgacctctcactcttcgtttaggcggctgacgggcaatggccaacctcacaaacacctacgttgatatcgcgggctccggtggctagcctgtcaagtgttgcagatgcggctgacctcacaggtatcaatggccaggcttgcgggcaccacggcaatggctagcctcgcgggcaccgacggtagcggccttccccttggtggtgaggcctaggagcccactaaaggttgcctccccattgggttgccatatccggccacttggaggctaagggccaccgtatccgcatacctccggcctccctgccttgcatccctctatcgccaacacctcctcgacgtcccttccctctgcttggttgttgctcactacatgcgatggggttgaaggcacctccccccgggcttcgaggactacactactacaaaatgggtttacattgacacctaaaatggatttttgttggcggccggcggcatcgccagtaaccgaaggtcagtgcaaatacaaacttttcattggcgggtgcctatctgcatatgaaatccattctttaccggcaacatcttgatggctgccagtaaaaaagaaacttcactcacagagagattgagctgaccgcctgtgataaggattttcagggaaaagaattgcacaaaaaatatacaaattcatgcccccatctccaaaatctaccttagaaacccaaatccacattcttaaaaaaaaaaccccccctaaaatccacaatcccaaatcacagaagtcatcgttgtcgcaacgcctatcgtcgttgccgaggtccaaatccacctctcccaaccctgcaacagaggatgaggccgaggcgcatgcctcatccaccatcgctaactgcccctttgcggcaggctatcaagccccaggcacgcgtctcctcaaccgccgtcaccgcctagatcctgagcccatcgacggtggatccaccactcctgagattggtaatgacggatccgacactcctgagcttggtagcgatggatccgcctctcccaacctcattgaaggaagatttgcctcacccaagcttgttcgcaactctcgccacagtagctgttgccgtcccgacctcactgcagtaaccgtcattgtcaccgagccatcctccgctagatctagtggtggtcgttagccctctttgttgctaccgccgctggtggcctcctcccctccgaccagatctaggagagggatgggagtggggaagccgacaccgctgctcactctgctactgccactgctagcggccttgatcccctttagccagatctaggagaggaaagggacgcaactaagccggatcggcctcaaatctgtgtccacgacaaatttgtgcaaatccaactggtggagttgcagccaactcggagtgaatcaggagattatttacaagaaaagaaatacattgtttacaagtcgacgctgccaagaatagagaaatcttttacactctcaatgattgttctcgtgttctagcctaccagttacaaacagagaacgggtacacactgatctcatcgctccaggcctccagcaagcaaaagaacgtggtgagagctgttctttcagatgtatgacgcctctcatcatgtcaggtcacatcagagattaacaacaagtaaacatagattaactttcggctacttgattaaatactgccatcaacttggccagaatttggttttgtgctttgtcaaattcggagagcggcttgtccgacgagcctccatagccaccggccgccgcaaccttgattatatcctccacttctctcaacaaatgtccgaccacccgctctagctccgccgcgtcgggcggcaccggcagcggcggcgcgtcgccgtggccgtgctgagcagccaacggatcatccgcagccggcgctggggcggcggcgtgttcgccattgttgatgggcgcatcaattcggcataatcccttcgcatcagccatcaaatattcccgcatcttgtccaagaacacgctgtccactgccggaactggcccgctgtagtaccgggccggcggctgcgcagccggcgcggcgtcgtgctcgccgtcaccgttgttgttatagatcatcgcgccgccgtcgttgaggccagccggcgccggctcctgatcaagaaactgctgcggcggcgtcgcaaagggttgttccaataatggcgcgccaccagcggagctagccgatgccatggcggactcccctgctccgtcaacatatgcattttcaggtggctcaggcaccaaagtttccaagaacacgtcgtgcaccggcggctctgtagccggcgcggcggcggaggcgtgctcgccgttgtcggagacgacgagaccaccaccgaggccagtgaacatcacctcgtgatcctgaccaagaaactgctgcgaagtcgcgaggaaatctccatggaagagatgctgttgctgctgctggtatgcgtaatcctgttcttggttgatcatttccgtatagaagtaatcttggtcggtctgctccgccgccgcgacgtgataatcttggaaattctgctgctccggtgcacagtattcctgttcttgatcgctctgctccgccgccggcaagaactgctggtattcttgggtgtaataagtgtaagaatgcggcggcggatgatcgtcagagaagtgttcgtgcggtggttcgccgtacgaggacaacatcggcaacggaggagcgacggcggcggcggcggcggcggtctggacatggacgtcgacgaagacgtagccgtcgggcacgcgcttgcgcttctggccgtggccggtgaaggcgatgcggcaggcggtgtgggtggcggcgacgcgggagccggcggggggcacgacggcgaactcgtgcatcacccacccggtgctgccgctccggcaccgctcgtcggcgtggaagttgaggctgaactcctcccaccggaacgtctcgccgccgaacaccaccaccggctcctcctcccctctcggccgctccgtcctctgctttatccacttgccgccgccgccgccggtgacggtgcggctcacctgctgctgccgccggccaccatggccgtcacctgcgggcaccggcccgatgaagtaggcctcgtcctcgccgccccggccgtggcggtggagcagcgcccacggcggcgcgctcgccgggtcgtcgaggaagacgacgccgtcgacgaggaggcgtcggtgctgcaagtagggcaggaggaagaagcagagaagctgctcgacggacggattgaacttgaaccccggggagagcccctgcgactccgccgccgtcgccattgacgcagttacaaatcgctcccgcctagctagctaggtttgttttttttttctttttctttagaaaaaaaatcatggagaagaaataaccgttatatcgggagaggttggacttttcatcccgattcgggctcgacccctcgtcgttccgactccgaaaccgtccatggcccgtacttttacatctcggtcgtctctcatctcgtcgcccagtgagagcagcccacgccacgataggtgtggatagcttttttcgtaatcctattttagccttatattgcgttcttattttttaatatacgatgccgttgattttttatatatctttggttatttatcttatttaaaaaattatgtgattattatttattttactgtgatttgatttatcatcgaaagttctttaagcacgatttaaatattttttatttgtacaaatatttttaaaaaggatgaatgggcaaacatttataaaaatacaacggcgtcatatatttaaaccggaggtaatataagtttaggttaaaatgaataaaaaaaaagcccactttatttttgaaataactcaattttgtagcctaaaaatttaggctctttaccacccctagcacacgatcaactgaatatgcacacgtgcgtgtagcctcgcgtgggttgagcataaaaccacaatatattatttggttgctcgtattcacatagttggactcatcttacttacttacatgtacacttcgccatgttcactaaaagattattgttttagctaatcaaagatatattaatcaagggattaaaagataaaaacattattaatcaagagattaaaagattgctatgctttcattaatatgcagagaaaataagttcagggagaaaacgaggaggagagaatatatatatatatatatatatatatatatatatatatatatatatatatatatatatatatatatatattgatggttagaacgagaaaaaaaaagttctacaaaaatagtatacgtgggacaattcttggataaaaatataatcttatattgtctacataccgcagaacggataaaccatcggtctcaagtcgaacgaccccctaatttgaccatcagcctcaagatatgtcgctcacagtgaatcggcaaccagacactggtggagaagtggtttttactcccggttcgtaacccccctttagtcccggtttttcaaccgggactacgaatccgggactaaagatcgctatctttagtcccgggtgaaataaccgggagtaaaaatcgatctctagtcccggttggtaacaccaaccgggactaaagatactttatctttagtcccggttggtaacaaccaaccgggactaaagagggaataacagcagtacagatggtcctcttttttcttttttattttctcccgaatcaagtgggatgcatatccccaaatcccaaatcaaagtaacatcccaaatccacatcacaaatctttaagttacttatacacataaatcaaatacatcacaaatcctaaaaaaaattacacaaatcaaattacatcacaagttctacaaaattcatcgcaaatacatcacaagttcacatcacacacaaatcaaatacatcacaggatcatgcaataaatcacaaattcttaaaaaaaaaccacagaggcgccgctcggccggctgctgccgcctcctctccgcgccagccggccaccgccgcgccgccgcacgccgccgcgccgccctccgccgcgccggccgccgccccgtcggccgcgccgccccgcggccctccgcgtcgcgtgccgcgccggccgccgccccgccgcgccggccgccgccccgtcggccgcgcctccccgcggccctccgcgccgcgtgccgcgccggccgccgccccgccgcgcggccccgcgcgccgccgcgccggctgccgccacgtcggccgcgccgcccgccgcccggcccgcccgatccaaaaagaagagaggaaggaagaaagagcagggaaggaagaaagagataaggcaggagttagagaggaagaaagaaagagagagtttgttgtgtggacgagaaaagaggataagtaatagggattatatagtacgtgttgatttttattcccggtttgtaacaccaaccgggactaaaaattctatctttagttccggttggtgttacaaaccgggactaaagatcctaaacgcctgacacggtctgacatggaaccaaccgggactaaaaatcatctttagtcccggttggtattaccaaccgggactaaagatgatttttagtcccggttggtcatacaaaccgggaataaagatcatctagtcctgttgttcttataaaccgggactaaaaatcgtttttagtcccggttttaaatggaaccgggactattgtagatttgggtcgaccgatcaaagatggtttctccaccagtgagatcaacacggtgtatgttctattctgtttaattctcttatttgtttcaatctttgttcggtttgcaacctgcaccaacgatgtattgatgagagtgatctttgttcataactatcagatttttttcatggatattgttaattaatgctaattacattgatctaaccgagaattggccattctgatgatagttcctaattgttgcatatcgtaagcttaaaacgatggttatgcaactgtttgccaatcatagatggagatttaccaatagacaggaataatgttattttgtctagtttggtttccttttaattttggttggtgtgttagctttcatttggattacactcttacatagtgctagattgtaataattggctgtagctcttctgagcaaaggccgggatgttattttattctattattaaaaaaatcaattttttttcatagcatcggctcctgcagtgtgctcgacaaggttcggcaatggaaaagaagaaaaaaaagaacattcatcttcactatgtgccacctttgagaaacggaaacgcccatgtaaaacaaaccgtgaaggggcggatctacttattaggtatggtgggtcaaccgacacaactacaacccgtgtcattccagactctcaacaacccgtgtcattccagactctcaagacacccctaccccttatagtagtcatgtgtcattaaaatttagtataacaaggtgtgaacatccaacagattagtacatctcttcatagcacatgcacgccacaaacaatgatcaaacaatgatcgagacatttatgtgattaattaaattaaaaatatgatatatgttgtgtttgattactcttatcgagtgaacatctttgttctctgtcccatctatattttaaagctgcgtacacttcgcaaatatttacaagaactttatattccttccgcttcaagttacaagtatgtatgtgcattttccgtaaaagatcagttccataagtgcttatatacaagatcattttaatatacaggaatcttgcacattttaagaacacatgttacaagtgtttatatttttggatcagagagattagcattttcatatcaatcttaggtctaacaaaaaggaaacaaaagtccataggaccctatacccaagcatattcacattccctccgacgtccggccctacatgtcttccaatcttcaaccattggagcatttaatgatttgccatttttaaaacggaattgttaaatggctgtcgaatgatttttagcccaaaattatgcagattactaaccatgggatttgctttgcgattcgtgctccggcgacattagctcccggcgacaccttctccaactctggcgatcccgacgacagcaatggaattagggtttagggtcccgggttgggatgggggtgggagggggggtgggggagggggaagatgggggatcaccgggcttagatggatggccgtgggaggcggtggcccggcggtgggtggtggacattggcgggcgacgaggcgccggtggcggcgccgaagccgcggggatggaggagggcggtgggtcggcatcggcggcgggggcaaacggctaggagacggcgaatccgacagctagtgattaggaggcggtggctagtggtggcggatccagcggcgggaagctgctggagatgggaaagacggctgggcaggggcactcgcgccgtcggttggggaagagagggggtaggggaggaggctggccagggggagggggagggggaggggaggagggggggctcgccggcgccgttgggcccttccgaccagccggcgagccaggcggcggcatgtggggtggcgacgcgtgggggcggcggcctagaatgacgaggggaggtagaggagttagggttagaactgcagcacgaatcttaaagcgatccgacggtccagaattcatatgatttgtgaggtgtttttctgtcaaatgccatctagacatcctttttaaaaggcgataatgaaagatttactactgtatgtgaatcaatatgtatctataacatatgagtaaatttttacttaccatttataaaagtggtaaatagttaaatactagtatgtcttacgatcagattattactgctcgatcgggtcagtcactttacatctaaagagaaaaaaaaggaaaaagataaaaacagagtcggtcactttctcggtcgggttctcgggtcaccgtctctccgcctctcccatcccgagcctctcgcaaaatccattctcccacgcccagatccaccgccccccgccttgcctcctccgcgtcgccgcgccagtgcgccccgcctcgccgccgccctcctcctcctcgtcgtcagggtaagccccccgcccgcctcctccgctccgagcttccccggtttccgctcgaggtggtttcgccggacctcttggttgccggtttctctggatggggatcccgatttagttagccatattctgcgttttgggggaaccgggacgtcgcaaatattgctcctggattggcacctgttcttcccttgtttgcgttgcgatttctttctactagtattattattctgtattactattggtctgcagaagaggcccttgctggggattttttttttatggaatatgacgatcgtaggcattgtgttcgtggctcaatttcaaattccgagtaggaattgggcgttttttgtatagtcggcaagtaaggtaatggcggtggcgaccattctgtctgaaattgaatacacagatgtgctagttagtttcatgagatgcaaacggcatggatttgtggtgctccttggcgcgctacccggatgttctagtttcatgccagtcatgccgatgctgctaaactactatgtgcaagtcaacatcgtatgtgcatctgtttttaagattatttttgttagccctaaaaggttcaatcctagggtggttgatgtaagcatattttggaagcacctgtctgttagcttatgggaatcattagtcattacactttttagaaatggaggcttgtgaagtatgtgagaaatataaagttggtacaggatagagatggtgccaaattccttatctagaaagatttggtgccaaatgcctaaagcaaggagctgtcaccatgtgtattaattttagcaacatctctcacaggattcacaaaagtgaatatttaaaaaaaccaaatttgcattttagttggagaatggcttcatcccttcacggcttcacctgatgaccagctttgaacctggtcttttacactcggtgaacaaaaaaaacttatcttttacacttcctttgatcattctcatgcccactaagcactgaaatgttggaacaccagttaccttatgccagaactgtcaattgctggactttttatttagtttcattccttttttctttgttgatgtaagtctcactgagtcactgactcaatgtcagtgctttttgcttgtacgaatacactggttaatgattataagacagattatcagatgtagtgttttcttgtgatttgtttgtcacgaatggaactcgttgcatgggagagtcctgcgttgagaaattactttcagttgccaaccaatcatatgaatgctagtgtttacctgtttcaccttgtgctgaacagaccaacatagatacttcgaactaccctaaggacttatttgcctgctctttagtttatttattgtttaactaccacactctcggtccaaagtagatggcatttgaatgtgaccacctttgtagctttttcttgaggatttcaatactttcatttgttgacaccagtatcagtttttatgtgctaattttttcttaatgtttcagtgttatgtttttcatcactataaagtccaataaagtgaagagtgactctgcatagccagatggctgtggacagagatatctttggtatctcaggtccgacatatctgaatcctgttaattggtacgtgctcctgttgtgattacagtgttacatgacatttcctggaaaattttgtgattcttgaattattatgtatgtactatgtagagatgctgcacttaatctacgtttttaatttttatgcacatgcatgcacagaactaaattctgttaaatgtcttaaggttttggttggttcttatcttttatttctatgatagataatattaggtctatttaggcatttattattacaaaagcttctcatgttaacaaacttgtcacagccatcatttgtattttttttgaagagggcattagtcataattggtatgtcaatagttaaagaaaaaaatggcatgtcttacaatatgatgcatgaaagtgtgcagacaatctttttggagtttcattcattgtggattgagcttcatatttatgtatgtagtgttgacaatgaagcatgaatttagggactagtaatcaccttgatcttcatcgatgatcagcaaaaccagctgcctgttggagctattgccacagagtgcacatatatgattattttgctaggagtacagatgtgatgaacagtttccgtagtgcattaaattggtggaagtaactttttccctcgtttatgaactctcaaaaggaactgtgagcataatcggagatctgtggctgcatgcttagttcaggctgtatatgttttggagagggaccggcaactaggtcgtcaatctgttgaagccttgggacctccttggtgggaattcttccattttgagttgatccgcaagcttgtcgatgatgctgacttgtctattttcggtgcaatatttgaattcaatcctccttcaagtaaagaatcttctgctgataatgcaccgagatttgttattgccttcagaggcactataactgagaaggaaaccatctcaagggatatcgcccttgacctccaccttgtccaaaatggtctccatcggacctcaagatttacaattgcaatgcaagctgtccaaaacgtcgcctcggttttccctggctcaaacatctggctagctgggcactcactgggcgcaggtatggccatccttactggaagaaacatggttaaaaagggtgtgcttttggaaagctatctcttcaacccaccttttgttgccgccccaatcgagaggataagtgatgagagagtgaagcatggtttccgcattgcaagaagtgtaattactgctggattagccattgcaatgaaaggaaaaggcgaggggagcagccagaggtctgttgcagaagattctttccacattttgtcatcatggacgccatatctgtttgtcaatccaggagaccatatctgttcagagtacatcggctacttccagcatcggaagaacatggaggatctcggtgctggatttatcgagaagctcgcaacccaaaattccataggagatctgttttacaaggcattaggatgggaatcggaaccactgcaccttcttccatctgcagacttaattgtcaacgtaagcccttcaccggacttcaaatatgctcatggcatcagccagtggtggcagcctgagctgaacttgcagtgcagtaaatatcggtactctgtaggtgcatgacattggaaaaaatgtcttaggagacccttcttacactttcgtttattcattgtggttcgttccactctattgtagctgtcaatatgctgtaatagatgtttcttgaacctctgattctgttgacatgaaaaaaacttgtaatttcgtggagcaacgatctgtcagtctttacacatatgttcgtgttcatgtagctcttcgttatttgatcattttctggtgttgggtgagcatacctctctcttatgctcataaattgtttttttttcctacttggtttgaaccatattaactgttttaaatatataatgtcattaatgtagaactcgcggctaagcttttctttaaaagccaaagctacttttgaattttaaagttgatttttaagaataatcctaagtagattttttacatggtctgataacaatcatgaaaaaagggtaggcaattgaagtggcgaagagaatctactatagttaattctaaattcaaaatcagtgcagcttctaacagtatattggaaatctccttataggaagcttcatgaaatattatccctatatttcctttgctttccaagagaaagaaaattaaagaagtggaaggggtcggagcttcttatatttggtattcggggaggatgggagaagtaggttcgagatggtttttttaagagtaaattttagaaaactgcaactttagtgacaaaactatcagtttgctgtaacattagcgacatgtttaagtttgttgcaataatagcgtgagaaattatcataaaactataacttttacattatatgctactacagtacatataggtgacaactgtagcagcatataacgtaaaagttgcagttttttgataattttccacgctattgttgtagtaaactaaaatataccgctaatgttacagcaaactaatagtttgtcactaaagttatagttttctaaaatttactcttttttttaatggatcttgttaaaaatgcagaagggagaaaagggaaaaaagaagggagaaaaagaataatatggaaaaaaaaagttgttaaaaatgacgaaaaatagggaaaatagaaaaaacacatgagattttttttctggggggatcggaaaagcatatggaaaatttgggaaaaacaggaataacaggggtaaaaaaaaaggaaaactacggtgaaaaaaaaaggtgggctggtctgcctgggctatgccaaacggaccttgcaggcacggtccacacgccgacgtgccgtgtttgggccaactgtggtgaagtcgtgcctgggctggcatgcctttgtgcggtccatttggtcacctatactcgacctacaaagagcaatgcttgagccaagcccccacgcgcgatgcgcgcatgctccgcgttggagaccccctccacaattctcgcatgagtttggtgtggtacccactagcatgcattaattgctataaagcaagcctcacagtgagccacgtcaccatgttatttcagtcattggatcaacattgtgccacaaagatcaaccgttagaggaataagttcacttgaggtccctcgatttttcgccgagttcgaaattcatcccttgagcgcaaaaccagatacaacgcatccctcaacttacaaaaccgtgcaaataaggtcctagacagtattgtatccggttttggctgatgtggccgcatacgtggctcctttgactaggtcattgtcccacatggcattgacgtagcgcttatgtggtaatttgatcccaaaaaataaataaaaccatgggacccacatgtcagctacacaggaaataaaaattggtggggccccacatgtcatcctcacttcttcctcttctctctatcccctctctcctttctcttctttctcatccttcctcctcccttcttccagcaacacgccgccgctgggaacctgcctccgccgcgagcgcgtcccgggcgtggtcctcctcgagctccgcgaggcgtgttgccggcgccggcggagcaaagtagtcatcagggagctctcgcttgcctccgcgaagccctcgcctcgcgccgccgccaccacggcatcgtcgtccgtgtcctccgcctcgtcgctacgggggaggaggaggaggagggtggggggtggtgtgcgcggcggtgtcgttgggggaggaggagggtggcgggggtgcagccgctgatggaggcgctgccaccggtggcgagagcggcagcggcggcggcggcgtggtacgaggtcaggctgcgacggtgctcggggacaaatttcagttagtgggatccaaactgaggataattaggcattgaatcctttatttgatcatttacatcaaaattcaaatcagatcgacaagaacaatcagacaaggattcaggattttgctttacctcccgtaggagaggcgccgggaaatttctctgccaaggaaaaagagatcgaattatatacatagacaaactataaaattgatctataactaggtactactatataaagggaaatgtaaaaggtttactaaccatagtcacccaaaaagaagaacaaagcgaaaaaatttttgaagaaaaacagagacgaagaaacaaatcggagtgagttggttgtactgactgttgcacttgctcagggcggagaagttgccgccgcaggcggcagggagggcggcgacacgggtgtagttgatcttgatgccgaagtccaggccgagcgcgccgcagaggcaggcgacggcggccgggctacccagcgtgctcttcacgccggcacagcagtccttggccggtctcgccttggggctccccggcgtgatgtacgtcaggcaccccgccagcgccgtgatcgtctacccgcagtctgacgacggcccgcagctccggccgccgctccctcctctcccatctcccgtctgccgccgcgcacagctcctctggcatcagcggcccggctgtcgccccctgcgcttctccccgccggctggcctccccgatcgatttttgtcgtgccccgcccttctccccgccgaccggcagccgccgcgcttctccctctcggcgcgcctagagagaggagaggggaagagaggggagatgggtagagaggaggaagaagagaacgggtgagaatgacatgtgggccccaccatttttttattaatttgtgtgtgaaacgggtcccacggggtttattgtttttaccgaatcgaattgccacgtaagcgccacgtcgatgccacgtcaaatggagaccgagtcaaattagccacttaggcgtcacgtcagccaaaaccgtcttccaaactgccgagggacttcatctgcactggttttgataattgagagacccgttgtatctggttttctagttgaaggacgaaaattggatccgttgacaagttaaggcacctcagatgaacttattccaccgttagatcttcatttcactaccaggcctatatatgaaggaaaaagtacaccaaaggtccctcaacttgtcaacaggatacaaaaacatccttaaacagcaaaaccagatatacggggtccttttaactatacaaaaccaatcaccagaggtccttcggcggttttgatcccggttttgatctacgtggcggctgagtcagcgtgggacccacgtgggccccatatgtcagtatctcttttccctcctctcccttttctgctgtttctctctcacacacactcttctctcctacggccgacgatgcagcacgggagaaggggagggcggcggcgggcgaacacggtggcgggctcgccctccccgatctcactctccggcatggggaaggggtggcgcaggcggcggaccggcgggagaccagcggcaggcggtcgtggatgcggcgctcacgcggggctggctggccgcgcggtcgtggttggcggcgggtgaggtgttggcggcgagcgcacccgggaatcgatggggcagaggcggccgcggtcgtggcccgcgagtccaggcagctgcgttcgttgtgggggattggattcggtcgtcagctgcgttcgttgctttgatggaaccaaggccacgcgattccgttctgatcgacttgttccatttcatctactgtctcaatcagttcagttgttgaggcgcatttgatttttgatttgggtcgaaaatttgatggctcaatctgatctgagttttgggatgaatggatggatgcgtgcagagcaacggaggacagggagaggaggagatggtgagccaggggagcgcgggagggggagtggcggcctcctccggggtcgtcgtcaacatcaccaccgggcccatgacggagacggaggacgacatggccgtcggcgaggaggaggaggtggtggcggcgtcggcggagacggaggagcacgtgcagcgaatcctcctcgccatcgacgccttcactcgccaggtccacctctctccattcattaatttcgctatttgtcattctgaatttttcatcgatcgatgagattgcaatgccaatgcaggtgtcggagatgctggaggcggggcatgcgctgttcaagaacctcgccgccgacttcgaggaccgcctctgctcgtaagaccaccatccatagccatggccatggacacacacacccgctaataaaataattggtttggttggttgcttgatgacgagcagcataatcaatcgatgcaatctggtttgtttgtgaatttggcgtgtacaggatccacaaggagaggagagggtggagaggtgggaggacgagatccgggagctgcgcgcccatgacgccgccaatgagcaggcacgctccctccgccgccaccgctctcgtctgccgacgtcgcaccgttccagcccgtcgacgccgcaccgctctcgcccgccgacgccgcctctccgcaaccgtgctcgcccgccaccgtcgccgcttcgcctgctctggccaccattctggtgcggcgacggctccttccccagcggcgacggtgcccggttgaagaggtgccccttgggccgccctgcgccgtcgcctccggccggcttgcctagtcgccagaagataacagtagagtgagagagagaggagatagggagagggtgatgacgtggccagctgatatgtggggcccatgtggtcccacgctgactcagccgccacgtagatcaaaaccgggatcaaaaccgtcgaagagcccctgttaaccggttttatatagttaagggacccagcatatctggttttgtggttcaaggatgatttttatcccgttgccaagttgagggaccttcggtgtactttttccatatatgaaaacaaggcccaattggatgtttcagtccagtcgaaccccatcatcttcccgtcggccttctgccatgaattgggaaagacaccatagttaattcaatttactcttttgataagtcttttgcaattcctcatgcaaaccatgctaatcgtctccatcatggtttgtttcctcttcaacaattgtaaaccagaaactgccattatctggtgtcatgataaatctcattgattctctttataactctcaattcctcctatataagtgtgcaacactgcccgttttcctgcaccgtctacactgagtcactgagccaatttgattccctcacttgcataagcctctcacaagtcgaagccgctttcctatgcgacaacagccggctgatttagccaacatttggtctccacctatgggaagagcacaagatacgaaggcttctgcgtgttcatgaacaacattaggttccctttccgtttgatttactccacattcatttttgtaatataagtgctcttttctttttgttgtttccagcaagcttagagcaagtgcatataccgatccactgattgggcgatgaatgatcaagccataacagggtcagggtagtaatccaatcaaattacacattacttcatttttgtaattgttactctctctctctctctctaggatagtcgtcttttaaattttgctcatgtgcaacatggtgatttaatacagaatgaccatttaagcttctgcaacactttatgaacgtaaggaaattttataacaatgagcgtgctaattgtaatttacatgggtccattgacaacaaatatttgagtgagatctcccaaatttcttgaaattctcatgaagttttgctattttttaaggctcaattccatattaatttcatatttctttgttcctattgagaaaatctcagaaaactcaatatgtacagtagtacaaactttggcttgggttgtagttttacatgtgagttaatcgtttttgcagaagttcatccttaattagtatatagaggtgctgatgtgtaaaaaaaatattaatccttctaggttgcctttgcttttttatttttctttccccaaagtgtcatccaacaatctagctatgattgtttcccaaactaggaaggaagcccgcacagatgcgcgggcaacttatatataaaagattgttaaaaaaagttgtatttcactatattaattataagaaccgcttatttattatttataaaaataatgctaaagaaatcccatctcgccatattgattaattataaggaccgtagatcaccttataattatatgaaaataaatatctagaccacaaattttgatatactaaatgacaatagtatctttcattttcaaacagaaataactatgtcccagatatatgtatactcgcctgtcaccactatttattatcgttgtattataagttgtgtgcctttttaatagatgggattacatccatccaagaaaacaaacttaatatgtcattaatacaacaaaaagatcatctgtacttcatacctaattgttcatgcctcacttgtgtttaaatatatgtataaatattttgaagtattgctcctaccaattcatgggataaaacatttaacattagatataaatgcccctctaatgggtgaagccgacagtagccaccaaggctttcttctcttatgccttgaaacatgtgtcctttatcaacatagccgtgctcctcaaaatcagtgtggagcataattttaacgcttaattcattatcagctaaagaattgcatcgataagtaggctagttgaactttattgcgaatagtagcctctcaccagggtcacctttactcagtcatatgcatgcccccgccatttctacagaagcagagtatactacgttatccatgcttagcgcccttcaagggatgacacatagataagatggaagtgaatttttttttagttttgagtccatttatgaaatagagtgacacttgtttatggcgttaattggtccactaaattttatcatatataattatctcttctgaaaatatgtagagttgatcttgagaagtaattgttcatgaacatatgaatatgagttttgatatttttttttcattattgatctaattcatctatgcatgttcgtggggtaatatataatggaacaatatatgttatcatgtttatttgtgctgattgttaagacaatttataataacatgaagattgatagaatgtggtttcatttaatatttttttattcaaaagatagttaacatatttatcaattttctatagaaaaaagtgggttgtaaatgaatataatatccactatcagtacgttcttaaaaagaatggagtaattgttaagattatttagataagaaagacataaaaagggttagaatattgttccatgtgataactttttaatcagaattgctatatatatgtcatgaatttcactttgggccatattttattacgaaagtcttattttagactacccttaaaccaatatttttattttggacagggtacgtattaatgatctcggttatgttggcttctaatgatcaattaactgtcacagttatatgtaataccatatttttgatgtatgatgtagatggatagaagcgttgaggttggtccaaagaatcacagtggtaaaaatatgttatgcaaagtaaaagtattggttaaaggttggtacaaagcaaaatatcagtaatagaaaggtgccttaaagtgaaatttaattttaatgttgagattcgtgctatagcatttagcgatgtggtagaatgtggagagatgtaaaaagtgacactaactgcgttcttaagagcaagtttaatagtatagccaactactagctttaattcatctatcgccaatctaatagctcattcatacaatagttacatactacactattaatacctagtcacacctgtcatagacacactgtgtcttggagtccgtactacagctggctataaatctgtagcctgctgctcttctctctcctgatttatctccttaaaatatatttgcagctggcttatagcatgctattgtacctgctctaactgagctattgctactactccaacctctactactaccagtacatgaccagtagaaacgttagatgctaggcatccacgcgactgtcaaagtgcagaaagagaggggtaataattagcaaaatctcaatgtgcatttacatttataatttataattatagagtactacacagtaattagggtgtattttatattatactggagtgtaattttaatcattcgtttttttcaaaatttaaatattgttttgtatttttaaccaagttaattttgtttaagtttacatcatcatattaataaattatgttgcattttgtttggtcgtaaccatagtgatctccttttaattgtactatgaaatctgactgttttagcgttcgttttatgtcagaagaaatatacggtctcttttttattaaaatatagttaacatagaataccctagcaaataaactggagagaaaggagccacaacagagggtagactgacctctaatttaaggattaggaaaacatggtcaatagtttttcttatgtacgtatatatgcatgttttttttccctctcctgtacgtgcatatatacatacatatattttctccagatgaatagcatatatttatttttctctcttacaaatacacattagattaggagagagggattaattattttaatatgatttgatctaatctaatctaatggttcaaaataataattcacttgtacatgcgaaaatcaattgttatatatttatttttccctcttgcaaataaggatgagattaggagatggattaattactttaatctgatatgatctaatctaatataatggttaaaaataataattcacccgtacatgcgtaaatcaatggttcgatgtttagcttttatttttttagaatattttggattttattgatcttaagttataagtttaattctaaattaaattatgaccatttaacttaccatgtttgtgttaaatttctagctataaaatagggtgtagagagaaggaggagatatatatgggctgcacgtacatttataacctttttttgcacggtacgtcactacgtacaaagggaaagagttacgtgtgggaggagagggaggtggatgtggaaagatattttagataaatctgccggtttgaaataatgggtccaccgatttaaatgaaaacagatggccaatggccagatgttttgttttttttcttagaatttctaagaatttctattattatttattagaatgccatgtgacagcttaggagcgtttgtaggatgccacgtggcggtttgagagcgtttgtaggaagtttggctttggagcgtttgtatgatgccacgtggcggtttgagagcgtttgtaggaagtttaatggacttttagtatataatagatagatagtcaattatcactcctgatgaaccatccagagactaaaaataattaagatgatgtgtgatgaaccatctggagactaaaaataattaatgtgatgtgataccataagagaatagagaacaaacattattaactatacttaacgaggatgtgctttataaatacatttaggatttatgggattacacgcgaaagtgattaattactaacggtaattaatgagcgataattaattaatcaccgcgagcgtgatttcaagccaaatcgtaagcaaccggcttgatgaccgctggcgcgaggcccgggttaacgccaactttgagcacgagcttgaggtcgtcgtgttggtcctccagcgcgtccctgaggaaggccaccatgaggccaccgatggtcctcctggccacctccttggtgtccccgaggttcctcatgcacatgcagttgttgatggcgtacggcacgccgtcgtccagcatgtccaggtggccgttgtcccgcagcacaaagtggtatcgcggcggcgcgcactcgtcgtagaactcgcaatggttcacgcccgccggcgcgcatggcgggccgccgacgtgcctcgggcctaggccggtgccgatttttttgtgtttttagaccgtagagatggaaaaggggtatagatgtcggtggtaatactttcaacacatatgtgccgatacctatttaatattttatagtaatgcgatgaccatcaccgtcaggggcggagctagagaaatatgagggggttcctaagagcaagttcaataagctagtttagccgacgataaaactgccacatcggatttgtcaatgagctggacacgagagagcatgagtcggggattaaattatcaccggctacacacacatcccaacgcaagtgcagcaacactaggctagctttgactggggcatgcaattgtggggtccacgcgagctggtgtgatgtaggaatggcgagacgaaacgacagcaacaagattaaaaaattggatgaggaagctagctaaagattaaaaaattggataatagtccatgtaaacctgcttattgtatacattagctcttagcaatgtctatgctgatgtggtcatttttgcagccattagcgggcgacactattgaccttgctctaactttctttatgtaaaatactgacatgcatagttctagaacgatattatactaaatagttacgtacccagtacatataagcatcatctgtctaattgaaggcaatatacaacaagaaagtgcatggaaaaaatttaaaaaatgcgtaccataaaaccatgccggattgaattttccatctttgttggaaataactgatatgggaagtacaagatcacgaggttggcaagacccattctctaagtactttctttttaccttgtctctttggttgggatgataatcatcaatttcttttcttaagcctggatgatattcgatcgtctcttggcatcatctagtcgaagggatgaactcttcacattgttggtacaatccattacttttcttttaagaaatttctccatagaaaccttttagagatcaaataaaaattttcaagctttatattgatacaacaaattaaatatgaaagttgagagaaagcgctcacgtactctaaggctgcgttcgttaggggtagttcccaacacctcctcctcatctttcgcgcgcatgcttttcaaactgctaaacggtgtgtttttttcaaaaaagtttatatatgaaagttcatttaaaaaatcatattaatccatttttaaaaaaaattagctaaaacttaattaatcacgtgctaaacgctgcttcgttttgtgttccagagagtgagggttcaaccctcactcccgaacagagcttaagtgttggttaacggctgtgatttttcatagaagcacaatcacttgcaaccgttctactccggtaatcccctccgttgactgcaaacaacaaacaataacctaatcattggtagacttgcaaaattaaaagaagggagcggcagggtgcaaccacgcaagacttaccggccggccggcgttggagacttggagttgggctgcttctgcttcactcactgcttgggctggtcggcaacagcaaggcgccaaggctgtaagggcaggctggcagggcagggcagccaccaaccgggcagggctcaggctaggcagctggccgccggtgtctggctcgggcacgccggcacggccggattggcgcagtgctgtgccgcagtgggctgggcagaacgggaagacggcgtcacatccatagaacgagaggtgagaaacaatagcgatttttgatttttggaagaggaaacgtcgaactcgaaacggtgccgccctggcgccttgattcccgtcgccgcccagccctacctctgccgcgcgctatcgatctatgggaaacacgagcgaattctcgtatcctcctctcagttgggcctggtagagttatagttttgggccagagttttggatctttggggggaggggggttccctggtttggactggggactgtctatatggtggagaatataggggtaataagctatttagaattttgggccgggttcttgagcacccccctggcccattgggctccgccccaccgtcaccggcatccccgggtggagggaccatggcttgaaggtcaagcgacgagggccagcctggagaggtcgggcttgacgccggggaggttgaggacgctgccgaggacgtaggcgaggccctgccgctcgtcggcggcccagcatgcaaccttcctggtggcatcgttcaagtcgagcgcgatgccgtagagctacggcatgacggcgatgaagccgtgggaggcgacatgcgacaggaggccctcgtacctaggggcggatccacccattgggcagggttggacggccgacccagctacggcccgcaccgccccaccccccaccctccttggctctatcaacattgggcccaaaatgagcagccgaagcgctagtgaccagtctaaccgccgatcgcataagccgcacgcgagcgacgcctcatttctttcgacctggatcggcgccacaccatcaattcgccttcgcggcttcccccttcagccttcaccgagacaccgagtcgaccaagcgccgacgcagcgacgccagcatgccggtaggtgctagccctatagggagtaggcgcgctcccgcgcactagccgaaacggtcccgtcgcggcgccgcaacgccgctcactccattcctcctggctcggtggctcatgcaggatgtagtcctactgttctggctgcctggttgacagccctaatcactaatcaattgattacttccatcaagtctgaacggtgaaccacttggctttatgagttgtctaatatttgcaaattaaggccctgtttggaagattagcccagagctaatgttgggagctcatgtttagtcatgaattggtaggctcaacattagcctagggtggtatgtttggatcgataggctaattcaaggctaaaaggtggagagagagtagaaagagaggagagagaaggagagagagagctgctttttgatggtccccacacaaaattagccccattagcaccccttggaggggctaatgttttgaggggggctaattcacattagctcaaaattagcccacctgtttggatccttgagggctaaacattagcccatggaaccaaacagggcttaacacgtcaactattatcttttgttgtataatgaatcatatatgacacagattattaatttattttaaaatgtttttgtttcccttaatttattggttacactatatttctatgtgattatagtataaatatgatatttagtgtgtttagctattcttatgaaacgaccatctccgctagagatacaagtgggtagtcccgttacccgtataaaaacctgtttactagttcatttcttacatggtagtgcaaaatttagaataaaaaatgaactagaagtgagataaacgggctaaaaaaatctgcttgtccgtccgcttgtatccatagattctccgtcctatctttattttaatcctgcttccgccactgctcgtaccagctgttcaccatgttgcagccgtggaggaagatggcgaccgggtaggtcccggcgttggcgggggccaccaccatgagcggcttggggcaccaagccttgggcacgctcgggagcacgctgtggtcgacgtgtttggcctccacgcggtgcggcgccgcatggaacaccgccaccatgccgagcgcacagccgatgtgccatgtatgatatattgatatgaggtatgtatcttcttcttctttttctgttagtgtggtgattggtgaacagggtttgcaatctcgaaattaggtttttggcgccggggggaggggtggttgtggggggtgttggtcttgaaagaaccaaaattttagaaatttcttggccgaaattatttgaaaatttgaaatttttttaatgaatttaaataaactttgactaaattcaaaaaagaaaaagaaccaaaaatttcggatgagatttgtgcttgccggtggggggcaagaaacaaaattttaataactggtggtgaatgttgagacgaggaacaggaggcgtagctgcatgctaacctctatttaaatatactgcagcgacgcgcgacagtaccatttgcggtgtgaccgcactatttctttatgagaaattttattacgttaacgaggtatgttatagaattgagatgtggaacaatacgaaccattgattagagaggaataaaattatcataaacaatataatggcttccgtatcaatcgtccagcaggttaaatgcacaagagatttgtaggagtgattgccatgcactgatgcatgcacttcctgaaacaccgcggcactgcatattggctactcagtgaggcggttgacgacagcggtctccggcgatcgaggagaggacaattgtatattgcgatcttggccgatttagatggatagcaacagcatttggcgatctgcataattagatcgatgctagtactatactctaccatctattcgcgctcgtcatctgaaacttggccatctgaaatatcaattaattaacgtcagaataagaaagggcaaaagatcgacaagaatcaattaggagcaagcttagcaagcatcacatgtacctccgtcaatgctaatgcttggatgattcgggtggatcttggtggcacgcctcagcgcagccttcaattcgttcacctcctcctcgctggcgccttcacaatccaacgagacattgacctcctggagcgatggcaagctccccagtcccaagtcgagaccatcgtcgccggcaccggcgacggcgatcgcctcccgcacggagaaccgggagcgaagcgttctgagcctcggcattgctcctcgccggaacaccgccggcccaacgaatccccacaacccacagcacaccaggcacgcgaacgagccagctgatccaatcaccaacaccaccccgcggattccgagctcctcgtggtccacctgcagctgcagatcgcggagagcaggcagcctcccgagggtctcaacgtcggcctgccggatctccctcacggcgatggatagcgagcggaggtttgggacatgcgacggattcgtcatccacgccggcagcgacgagaaccagcagatcttctctgtatccagtgcgacgagatgccgaggggcgacccaggcgtccaaaccacccatgttctttcgaacattgttcatgcagacgtcgatggagagacgctggatcttctgcaacttgtgtaggagacccaccagtttgtcgttccatccgtcccagaagatgatgcacagcaccctcagctccgttaggttgcccagctcttctagaatgcccacagtagcacaatcgatcaacacatatgctagatgttcaagccttgttaggcttccaatcccatctggcaccctcgcaaacccgtcgaagcatagggacgtcaaatgtctgagcttcacaatattcagtggcaagtcacaaatagggtttgccctcaggtccaaagtttgtagaaactgtatgtttcctatttcttctggggcctcccgaatatctgtgtcacgtagtcctagatacctcaagtgaaataaattcccaacatacttaaggctgtaaccttgtgaaagatcacaaccttgtaaatccagtacacgtaaaactcagaagctcctaaggacaggtactagatcagtggcagatggaaagacaagagctgtccttgcttgctgcaagctccgagttgctgaagtcatagcatgatcttcattgccattttggagggacaacctccgaatcgtgtatgacagagatccttgatccctaccatttaatatagtaacaaagttttcctcacttgacaatgagcagataagatcgaggaccatatcgtgtacgcgacactcagataccatgtcagtatacatatcatatatgggttggatcatatttctatttacaaggtcattgaagtaactctctccgagttcaaataggctcctcccttgtttcccacactggataaagccttcagctacccacatccatatcaaacgatctttttcgattttgtaatcttccggaaacacacttaaatataataagtaagttctcaaatggggtggcagatcataatagctaaatgacaagatctttctcatattcttaacatccagactattctcgagaccagtaccaaccgagttgtacaccttgtaccactccatcttatttcttgctttacaagccagcagactagccattgtaatgatagctaatggaacacctgcacatttctttagtattctctcggatacttcagccaactcctcatcaggatatttttccgtgtcttcacagttaccaaatattcttccatatagtaatcgtcgagagttatttaaagaaagatgtttcaacttgtaaacaccaccagctttttcagcaacctcagaaatacgtgttgttgtaatgattttgtatccaacatcattatcaggcaaagcacatttaatcattttccatattgagatatcccatatgtcatccataacaatgaaatacctgcatatagattaagtccttaattaggaaaaaaactaatgaaattagaacgggaagttcaaatactggggccaggtagattagcaagttcgtaggcaaaactagtctagctattgtgaatctttgccaaaacagagataaattattcactcaagaaaagaagatttggacatagctatttaattccgactcaataacgatgtaaaaaggcttataagcagttgtagtttttttttatttaacccggacatgatgaacattctcaacaattaacagtatgtagactgctaattagtacttcctccgtttcacaatgtaagtcattctaacattttccacattcatattggtgttaatgaatctagataaatatatatgtctagattcattaatatcaatatgaatatgagaaatgctagaatgacttacattgtgaaacggaggaagtattacgaaatggatggcatactagcaaattattagttgctgagaaaaaacatcatatatatgtacagattggtggaaggaatgtgcttccatatataccttttctgttgaaggaattctctgagttcattgatgagctgcacctcatccaaatccaatggtttttcattgagatctttatatttctccttgtcaagttgataaatgatgtccatgaacaatttcttcaagtcaggagtttgagacactgatacgaaagcacaacaatcgaacagtgatctaatcttttcatatactacattagcgagagttgtttttcccaatccccccgaatccaacaatggaaaccaccttgcctgctcgctgcatggacactccattctcttccgtcagaatattgatcagctcatctctcgtctcaccgatgccaacaagctctttctcatccgtgtaccgcgtgaataaacgagggtcaattgtagcagtcttatcaccaccaccagcaccaatgttgatctcatacctgcggcgacgctcgtgaacctcgacgacgcggctcttgatgtccatgatctcagaggcgatcccatggcgagccttggccttcctgaataggccgacacttctatcgattagcttgctgatgccccgtggtttggcctcaccgtccccgttgtcgttgccgatgtcgcgcacgacgaacgcgtcgatggtgtcctcgatgtcgaaggagagctctctgagatccctggcccagatcttgtcctggggatcaagctggtcggccggcgtggcggagaccttggcgagggcgccctgcatgctctcgagctcggattggaggaacctgatctccccctttaccgccttctgcagattgtactcgccgacgagcagatcacctagcttggcgatgacgcttggcagtgcacccgtcgccaactccatggatcaagatcttgtcctcctccctgggtggatactggatggtactgacaaagaagataagctcggagaggatgagactcactcgtcacccggtggatcgatcgtgggtgaatcgcctagtccagtcccctgtcgtcgctgactggatcgatagggcgacgctctcgattgattcgaagtttcccaactcgatcgatcgccctgcgctcgaacaggaggaagagctcgatgaggttagacggcagtttgaacttttgttcttagacttttcgatttagatgagataatgattagaaatgaaagatatcgttgctgttgggtcgctatagtcctacttggaagattccgagtaggtaaagttgacctgctccatacatgtgcttctgttctgacttgtgaccatgtctgcgttgaaattcgagttgcttcgccttcatcaaaagaacaattcagctgcaagtgagtttcaagtatgttttccaaatcttcttttccatatttcttgcccggctgcattgaccatccaacttggtcgttgggtcacagatcatgctttggcctcccatgcttgtcttttcctttggctcctagcgtaacaaagcgtaacaagtctggattttctacattttacccctttttaaaatcttattttgcaaatagatctctagaaaatacttattttagcaatggaccatttttctccaactagagttgttagcgccaaggttcaatgtcttagcatcaagcactggcaccaacaccgtcgccttctgtggcagctaaatcactgacgttaagggagtcggtgtcaaaaaaactgaaacataagtacctatttgtagaatattttttaaaaaaggattaaaatataaatatattttactacaacatgcccttagcgcaagtctcttttgcggtaatggtctattgtaagaaaaagtatttacatttcaacctttttcataaaatttgttctataaataggttattggttctagtttctttggcgcggatctcacctagatcacttgcgctaagaaaaagatatatttgtttgtctaagtgtatatttataaaaggaataaggctgcatccgttcctccttgttcccaacctctactccctccttttccatatgcacgcttcctaaactgctaaacggtgtaatttttgaaaagttttctataggaaagttactttaaaaaatcatactaacctatttttaaagttttttttagctaatacttaatttatcatgcactaatccatcgctccgttttccatggggagggttcccaaccctcaccaaagaacacagcctaagtcaacataaccccccaacctattaccaggtgattacttaaccccctcacctaataaaccagctatttaaccccctaatcttgttgatacagtttaattaataccatacagtggttttgcactctggttttgccccgctggcgggacacgctcgaccagcctggcacagtggatcgacaggcgtgtgggggatggggtgaataaaaatatgagcggttctctcctcgttctccttggaacctcctctctctctctctctcctaggcgaacaacctgctgatgacagggagtagatccatttgattggattgcagggtgaggtaaaggtgagtctccacaacctgtttctatgttttttttcccaatcaggttatctcttcaaggattagggctaattctacaaggtcttttagtggtgggttatgtattttttctgtgaaattttgatagtgctatgttgtaggcagtaaaattctcatcactctctgtgaatttctcggtaattttatcgtcttgatgattttaggatttagggcttatgaacacaaaaattagctcatacgttggtaccaaaggacacataaatttgctctatgggtgtaagatcttgctttggtttttttaagactaaccgaggctagaagcctcagataatatatagcgtatgatcttgctagttgttgtcatttaatatcatcaagagttaggattatttttgtttcttatttttgcaagaatggatccatcggattttcttccggtcaggtttcactatggtggggaatttatgttttctagggggcaattgcattatgtgacagagcgtaccgcattgtcatacatagagctcgacaagatatctttacctgagattataggtttcctcggtgaccacatgctagttagtgatttattacacttgcattggctatatcctgaaaagcagttgtcagatgggctaaggtttttgcttgatgacagtgcttgcatagaaatggaaaatcatacgtctaataatggtcaggttgcagacatttatattgagcatgtagcaactgatgaggggcaagatgataattagattgctgactggggctatggcattgcagaagctgatgatgaagcaaaatcagaatcaaaggcagagctacttcctactattgttctatgtaaagataaaaagaagggaagattgaaaccaagaagagcaacatctcaaattctagagaagcctgaagattcaggttcagatgcactagtgcctgaagatatagatgacctgaaaataagatagttcagactctgattataggcagcctatagagcaagatagctctggagatgatgaagaagctgaacaacttaggaaatttgcaaagaaaatcaagagaaacattagggcaaggaagctaggagttcatagtagccaggctgtagagatacttgatgatgcactggtgcctgaaaatatcaacttagaagatgatggcagtctgtattataactcaagtgatgactactcctatgaggagaatagtgaaggagaaacaattagatggaagagcactaataataggtttaacaaaaaaggcatcatttcctgtgttctctcttagcatggcatttagatcaagtaggcagttaaagaaggcactagtgaagtacgggctgacaacacacagacatattctattcccaaaggatgaaagggacaaggttagggcaacctgctattgaccaggatgtaaatggctaatatatgtgtcaaagacaagtaggtctaaatggttccaagtggccacttttaataatgagcattgttgtccacctaggagagataacaagctagtcacatccaggatcatcatgggagggctgggaattctcgaaatggaaaaattcacatctacgcttaggctacgatggttgtggctgtttgatacaagcagaccttgggagctgatggagatgccttgcaatatgcgagatgtacaactcttccaggcatgcacaaaaatcacagtaggagatggcaaaaaaaactcttttttggaaagacaattggttaccaggtttgtgcccgaaagatcttgctcccaacctcttcaaattggcaaaaataaagaataggaaggtggaaacataaatgatagacaacacctggctacattcttttagacagatcactaatatagaaaccatccatgaattagtgcaattgggatccctcctcaatcaaataactctttctgatcaacatcatgatgaaatatcttggacaagaaatgcctcatgaatcttctcggttaaaagcgcctgccgcttccaattcatgggttcggtgattgatcatattttcaacctaaattggaaggctcattcttcatcaaaaggctcttacagcagaaaacctgctaattagacactgggaatgcgactggatctgtactttatgcagagaagcttttgaagatacagaccatctgttttgccaatgcaacttcatcaagcaggtatgggcaagaattgccgctgaaaaagggattattcccaatcctaacatttccaccactaacagtggatgtgttctctagggtccactggccttaaaagccaaaccaggtcaaggatcggaatcctgttaaagacatggtggcatgtttggttgcaacaaaacggaaaaaaaaatcaattcccaagccccaagtctacaaagaacaatatcactcatcctcgacgacatacaggagcaggatatggttttcaaacctccatgaagggagaaagtcctgtactcattgctagagttggttgttttaagaatattttgtaatctcaactttgtaaacttggctttctaatctcctaaatatatctggctccttgctagagttggttgttttaagaatattttgtaatctcaactttgtaaacttggctttctaatctcctaaatatatccggcaaatcttttgccgctttcacttcaaaaaaaaacatccaggatcatagtaaataaatattttgatgttatcaaggataatccgacatggaaagtggaacatattaagaagtcagttctaaaggacatgcttgttgatgtgcccatttcaaagtgcaagcgggccaaagccttagtgctacaagaagcattggataaaactaggggagagtctcaagagtgtatgattatcaattggagttgttaaggagcaaccctgggagtattgtagttgtgacccttaatccagatatacttgacaagaaagtatttgagaggttttatgtatgctttgatgcttgcagaaaagggtttcttgctggttgtaggagagtaattgggctagatggttgtttcttcaagggtgcttgtaatggcgagctaatatgtgctattggaagagatgctaataattagatgtatcccattgcatgggcatcagtggagaaagaaatatatgattcatggtattggtttcttgggtagctaaaaaagatctcaatataaatgatggaggtgaaggatgggtgataatttctgaccagtaaaaggtatgctttttaactatttatcttttaacaaaatgtgcaatgggtcctaagttgtaataaatattttgaattacctgtcttgtagggactcataaaggcagtggctgagcttatcactagagtagaacataggatgtgtgcaaggcaaatatatgcaaactggagaaaaaaggacactgaccagaagcttcagaaaaaaatctaaaactgtgcaaagtcatcttgtagggagcttttcaactataatagagcaaagctagcacaagacacccctcaaggagccaaggacatgatgaccaccacacctgagcattggagcagggcattcttccagctagtgtcaaattgtgactccgctgataacaacatgtgtgagtctttcaacaactctattatggattcaaggttctttctagttatctctatgaatgaagccataagattcaaggttttttcaacattagctctctttgaccatgtcctgtacatattttttttctgaggctcagccctcaactctgctctatcaatatgtaaggcaaaacctcttcccttttgaaagttcaagtgctattaatttggttttggtgattaatgataaatccaattatatgagactaatttttttataagcattctttgcctagtgtcatgtggatatgaaagtgaagtttgtgataggtgattcccggacttcatatgagttgaaatagaaatgttaattgttcgtggacctaaatcacaaggatgaaatgcattgacctaaatcacatctttctctctatgcacatattgatatattcatatataatattttcatgtgattgacatatggatttgagactaatgttttgttgagccatatcttgtttagtctcttcacattgagaatatggagatgatgaaggtatgcttctaccttaatgtctacatatgataaataccttctattcttgtatagggtaagctcacgatgttttatctctagttatgcatactttttcttcacacacaaaaaaattgtatgcatacatttaggggggtaaatcctataccttagttatgcatgtattttgtcacatcctgattttcgtcttaggatttataaattatttaataaattattattagaatttatattaaatgttcattaatttacaagtgaagttaattgtggaaaataaaatttcctaaatataaagcatggatgtatttaatttttattaaattctccatggttaattatactctctggaattttctcggattttttggagctcaactcttaattttaatcatacaaagaacaattcagtaattatccacatattaaattaatcattaaatggtctgattataattttgttaagtactttgagtgtccaagtattttcaggatttttcttgaaattatttgagcattggaagtatttttaacaattcaaagatcatttcagtgattaatttaattggaaaagtaattaaaattcaccttttccttttcgggccgaattagggaaagtcctctcactctcggcctagtctcctctcagcttgcagtcctttccctctctttcccgaagtctgctttgtgtccctcctttaatcagtccttggaagtagaagcccagccgaaagtctagtttgcttccctgggcactgttcatcttcaagcttggacagaagcctgagccagccgtcctgtgcctggaatcgaattcgtttttgagtttatctctccaactaaccctcggtttttccggctcaaatcctctcggttggagtccgatctcttcaatccaagcctataaatagcatcccctagtcgccctctttcgtttgccccatctcccgagctctctcgtgcctcgtagtgccgccgccgcgccacccaaaccgccgccgtcgccggccggcgaacagccgcctcgcgccgtcgttttagccgtcgccgccgcctcctcacgccgccgtcgggtgcgcgtggaagaggggaagctccgccgcccttcgccgtcgccaccggtcgccggagagccgccgccgccgtccaccgaaccgccgccgccgcacaagctcgtcgccggtcgccatccgtggtcgttcgtcgcattggttagtaccggtgagatcgcgttgttctcctctacgcgtaggtgccctccaaaagtccggccgagtcccctagcgccggcgaggtcgtcgccgatgacgagtcgacattgatgacgtcagcatgacgtcataaccttttctttttagtttttttaatagatgcaaatagtttaaaacttcggaaattcataactaattcatcgtagctccgattcgagtggttcaagttgctaagtttttctaaaatcaagatctacatgttaaaaatatccacatgtactgtttatgattgtttttgtactgttttgttgattttgttcatttgctttagtttccgtcgttccggaggagagcgttttcgttgaggaaggttcggaagtgtttgcggaagctcaaggcaagtcacccagatcccaaacaaccctttgaacatgttgaacccgtttaaagctaatgatttatttcaacttatgcattattttcgaatgtcatcgggtgatgagcctttcccaattaaataatggccgaacatgactttattttcctatgggttataatttgattagcttggaccttatatattggattggttcagctaaatgccatatgtatgtttgcttagtcatgcttaaacattagctaattaaaggggattaaatataaatcatattatattattattaattacggttatatttaatggtagctcacgatggttaatcgtgttatgttatgtaaattaattggtaattaaaactggattaaggtgggttgtgagcacatggttttgaaggtcgtgctcatgacaattaaggaccggttcgcgagctactgttgtgaaacatttaccgtgccaaccacaagccagtgtgagcaacggctttaccttttgtatagcatgattcattacggggcaccagactgtgaagcggcgagaagtccatgggggtcgctggggagtccattgcctttggttttgagggggagattatgatccaggaacggtgcactgtggtgagttgtgttgtgcgaggggtattgtcacagttcctttccgaggtaccgtggtggtgctaaggcgcatggtgacatgttgtgggattgcgtcttgtgggtacagtggtacacctctgatcaaagtaaaactattcgaatagccgtgtccgcggttatgggtgagttgagcaatgtttttcgtgattagtcccacattactcattaatgttaataatgtgataattaatttgactcctggtttggaatggataattcctggtttggaggtttgatctgtacgaccggggttggctgttcaggtttggttgggcctgtgcagcattggggtgctgttcagtgtcgattaaaattgatgattaattactctactgatttacttctaaatgtttgcttaatgctgctttcgcaaatgaacctatattatgccatcctttggtatccttgtgcatttgcatatttgctgtgtggcttgttgagtatgtcatatgctcattcttgcaataatcatcaaacctcagttgaagaaaaaggatccagaaggagaagatgtttggcttatactccagttgagctgcctgtgggagtggagctgaagccatcgctagaccgttaattccgctgctattttccttttcttttgtaagtatgtaacattattattatgatggatttgtatattaaattgtcagtttgtgtacctcggctgattcctggacgaggattttatgcacaaattagtttggaaattactagtgaatttctgggcgtgacatatttgatccaagtttttcacttgcatttaattgggatctttacatttgagtacatgacacttgtgatattggttaatactcatccacttccttttatatgcgcgattggttgatcaacatgtagaggttgacaaccagatcattgagaccaataatttcattgagttgaatgagaaacattggtcccaaggattgaaaaggtgttgatgctcaatcgatatcattacagctaaaatactaagaatgacagtggagatattgaagatgcggaatacgaagtggctattatggcaagacgatcttcaaatgattgatgctcggtcgcgatggaccatgtgacagtgaagggcaagcaaggggcttggcgccgaagagccaaatccggtggtgaatggcgagtgacagctttgtcatgatggaccgtgcgagaccatttgaagctacaagtaaccgcatcaattatttgaagaatatatggtgaaacggttttggcgttgctgttccttaagacaaaggaatgaagatgaaaagaaggcattccaattggtataattctcttcctatataaatttgagtatagtaatatcgtactatcaagagggatgcagcgtcgatgtgtttgtgtatgtttcggtgctcaaagtgaccaatcatagtgctaccttgagagacactcaagctttaacatatcctttgagtggttttaactttgtttttggttgagttaggtagtcctctaagtgagcttttcatagagttcaagatcatcaaaaacggactcccgagcgaaaacttatggtcgttttatcctgtgcttttcggaaattctgaaaatggctgcgaaactgagataggcttctgttgattttttgcacttgtccgaaaatgcattttggaaattccgaaaattacagtcttggcctccaacggctagttttgagaggcttgggtatgtaaactcttccgccctttaagtggctgctgttctggggcaatattagacacatctaaagccaaatagctttttcccatttccctacctttgtggtgcctctttgtaagagggatttgagaaggggagagagttggattgagagagtgagaagttaagagctagcgagtttcactccatactttgagcacttgagttcatagcaaacaaatcttcagttgtgttagttactcttggggactaaggtctcctaaacggctaggtgttgccagtgagcgcccaagattgtggtgtgcctcgaaaagtttgcgaaggctttgatttcgcctctgtaagggaagaaatcaattgtgaaatcaaggagtgcatttgcacaacctcgtgaggaaagggttaaaataaacctagcctttgtggcccctcaacggagatgtaggatccgtggatctgaacttcgagaaacatatcaatgtgtctcctttcttgctttgcttattcttgtcatctctcatattgtgcttgagtttttttttatccaatcacttgtattcttaattaatatagttgatgaccttatatcttgcttcaatctcttgtttgtcaccttttgattcatatacattttatttgtttgagctacaagttcatagctagtgtgttgtttcgttatccgctgaattttcggttgaaactgaaactttcaatcccataccagaagttccgagttgaaccggaagttctcatcattctaatatattatgaagttgtgataatttttttaggaacgcctgttcacacctcccaggcgatatcaaggtccttttacctttccttaaaaaaagacgttgtattcatgcatattttgtgacagtgcattttcagaatcatgtgttccacgataactctgaatgctgaatataatgagttttatagctagacacggttattaacaaagtaggtagaattaaatagtggaagattgtgattggttgagaagtgaaggtagggaaattgaatggtggagggttgtgattggttgagaaggatatgttggtgaagatgttattatatttaggaacaaattatagaggctaaaagtttttatattttaggacggagggacgagggagtactgacttttgtaattctcttgtaggggtgaccaaaagagattcataatatgcagccacatcggacgtacacaaaatataactaaacttttttactgcagagcttataatatgcagtctctttggacagaggagtatgatttttttcttaaaaaaaatcatagctgccaaacaccaccttattacagagtcacttattaggtatacacgcatgcaccgctcagttattagtaatgaaacaaagcatatccagagaccaccttattacagagtcccaattcccttatggggagtcatccttaccaaaaaaaaaaaaagaaatatcgtggctgcatggaaaatagaaccttcatttcaggatttgcagcatcggcaggtttggcaatgttttttttctttttgaggtttggcaatgatttttagagtgaccatataagctgctactgacatcgtaacagttaaagcgaaatgtgccagcttcgaagccttgatagatttggctcggatggctgcagctatcctgcagaaacaaaaatacatgacaaaataaattagtctttccattacgctctagtaacatctacaccttcatagctctgcactaataaaaattatttagggaaattaaatgacacaattgaaagagcatcgatctcccaagataaattatcaaattaatagtaggcccatttcaactggagatagccaagaaacgagatatccccaaaaaaaaagtaaattttgtacatgagtctagacaactataatatccagattaatatacaaaaaatattttatttagatgcaaaagggtatgtaacctagttgttgcaatgaactgagttataccccaaggtactgagttccccatagtaacgaatttcaaattagattatttgaaagaccaaattctcatttttttaaaaaaaattaaaaaaaacatttagaacggatttacggatggagtactgaggaagcacaatacaataacatatatagaaaagcatggagagcgtgtccaaggttttacaattaactactttatacttactcggcattacgggattccacacaatgtgggcacttcgtggttgtactggacgagtaagtttgcttggcccctccaaacggatttgcaaatgcaaccttcccgtgattgcaatcaacagaggatgtcgcagtttttgcgcaggtcattttatcacttgaataagggcatattttgctgttaaagtaccttgcagcctgcatgagaaaggttcagagatcagaacatgaattcggtataatattatatatatatatatatatatatatatatatatatatatatatatatatatatatatatatatatatatatatatatatatatatatattataccgaattcaaatgttcaatataaaacttgtagaagagaaaatattgttggtccctagtccaatgtaaaactctgataataaaagatatcctagtgtagaattcacaagaagaaatattattttcccataaatgtatacgaggtattgtttgacatgccactgttccatataaaacatactccctccatccgtgattgcagtggcgaaactaggatttgaatactgtcacgccctgaagttcttctccctagcaaaaatttaattaataaattgtcgcaagaaattatttgtttaaaggcaagagagaatttttcttggaatcggcatgtggaatttttcttggattctacatgtcaaaatatgctaacaggaattttagtggaattttcagagccttggaaataattttagtggaatcccaagaagttggaggatatacctatagtacaagagtatcctgaggtgttcccagaagacctcactacaatgccaccgaagagagaaatcgagttccagattgatctggcacccggaactgctccaatctacaagaggccgtacagaatggcagctaatgagctagcaaaagtcaaaaagcaggttgacgaacagctgcagaaagggtacatccgaccgagtacttcaccttggggtgctccggttatctttgtggaaaagaaagacaagaccaagaggatgtgcgttgattatcgcgcccttaatgaggtcacaatcaagaacaaatatccgttgccaagaattgatgatctgtttgatcagctaaaaggagctaaggtgttttccaatatagacctgcgatcaggctatcatcagttgagaattcgggaagaggatattcccaagacagccttcgccactcggtcttgctctcttttcccccacactagagttgaagtccttctcagttgaagatgtcacaaagaagttggtttcgtcgctaccgtcaaggatgcctgtggaatggagtcgcccactgtagaagtcaagtcttcaggcttagctcgtttttttcctcttttttccgctgcatttgtaatcttttatatttttgtaagacgtggatctgtatgtcaataattgtcgtttgtgtaccctggctggtcctggacaggggtttaatacacattcagcttagaaattcttagttggtatcagagccgaccttgaccgtaggacaagccaactggaaaccctaagagtcctcttaaaccttttcatttgcacatgccttttgcacttggatttgtttcggtataattttggggtttgctcttttgatttgtgggaaaaatcttgatcgctatttaatcgtatttctcggctagaggcagtctagggttctagcaaaactttatttggaatttatttggccttcagtcgggaatttgttaggtgatatgcactaagtcgtgtctagattcgatgggcatttttatgtgtatattatagctacgcatctattttgtgcattaatttatcgtttagtcagttgcattagtatctttgtctgggttcatgaaaaatgttccacgcataaaaatcatcatgctcggcgagttatttgagtcatttgttgctttatttaatttggttttgagcatgtgttggttcctatccctctgtcctctttagatgtcagacctgttctctgatcgcaagcgctgctccaagcttcagagtcgccgcctttatccttaacattttcttagttttggctgcttgctagtttctgtgtttaggtttgttgcttgtgggttagtcggcggtcgatatcatgtgttagtggtatgactgccttaattaggagttgtttgctttctttttagttttttaatcaagattaaattaattgcacttaaatctataagaaagattagtttccaagccatctgttttcttcctttctcttatttctacctatcctcgtccagatggtgaagacagggaatgatccccgtgcctccaatgacgctaggggcagcgaagagcagaccgatggagctcatatcagtggtgcatctgacagcagttcatctccaccgcccgagaacccaacggtcactcagatgatgacaatgatgatacaacagatgcagcaacattaccatcagatgttgcagcaggcgcagcagaaccagcagtctggtcctccatcatcacacctgtccaaactgttagactttcatcatatccagccacccactttctcaagcaccaccaacccaatgtaggccaacgactggctccgtgcgattgagaagaagctgaaccttctgcaatgcaatgaccaagagaaggttgcttttgctacacatcagttgcaaggtcccgcttctgcttggtgggataactacgtggtgacccgtccagattcaacggaggttacttgggcagagttttgtcaaagcttcaggaaggcacaaattcctgaggggattatggcacaaaagaaaagagagttccgcgcactgcatcaagaaaccaggatagttacagagtacttgcatgagttcaaccgccttgcgcgctacgctcctaaggatgtgcgcaccgatgccgagaagcaggagaagtttttgtttggtctcgatgataaattgaccaaccagctgatctccggagtctatgatgactttgagaagctcgtggacaaggctatccgtcaggaagagcaacgcaacaaaatggaccgaaatagaaaggtagctcagatcagctttcctcaggggaacaattagaagcctcgcttcatgacgggacagctaggtgagccttccaccctgatcatccgtcagcaccatccttaccacccgagtaacttcaacaacgactacaacggtggcagtcacaacaacagtaagcagcataaccacaactcgacttcacccccattaatggcaccagctcagtcagatccgccagctatgtcagctcagtcagaacagctcaagaaggagtctgcaggaaagccaagaccctgcttcaactgtggcaagcacggccactttgctggcaagtgtccgaagctaaagcgcgttggacctaggttcgtccaggcccgcgtcaatcatgcgtctgcagagaaagcacaggcatcaccagaggtcgtgctgggcacgtttccggtgaactcatatccagcaacagttctctttgattctggtgcctcgcattcttttatatccaagagatttgctggggcacatggattatcggtagtggaacttaaaatactgatgcaggttcatacccctggaaatgacatgaggacagcacactactgcccctcagtgactatagagatcaagaggtcacggtttctatccaacctcatccttctcgaatccaaagacctagatgtcattctcggaatggattggttgaccagacacaagggagtgatcgactgcgcaagtcgcactatcaccctaagcaacgacaaaggggagaagatcaccttccgttctccagtgtcacagaagtccgtagcgagtctgaatcaggctgttattgaggatcagacagaaatagcggaaaaaaatcccaagaagttggaggatatacctatagtacaagagtatcctgaggtgttcccagaaggcctcactacaatgccaccgaagagagaaatcgagttccagattgatctggcacccggaactgctccaatctacaagaggccgtacagaatggcagctaatgagctagcagaagtcaaaaagcaggttgacgaacagctgcagaaagggtacatccgaccgagtacttcaccttggggtgctccggttatctttgtggaaaagaaagacaagaccaagaggatgtgcgttgattatcgcgcccttaatgaggtcacaatcaagaacaaatatccgttgccaagaattgatgatctgtttgatcagctaaaaggagctaaggtgttttccaatatagacctgcgatcaggctatcatcagttgagaattcgggaagaggatattcccaagacagccttcgccactcggtcttgctctcttttcccccacaccagagttgaagtccttctcagttgaagatgtcacaaagaagttggtttcgtcgctaccgtcatggatgcctatcgaatggagtcgcccactgcagaagtcaagtcttcaggcttagctcgtttttttcttcttttttccgctgcatttgtaatcttttatatttttgtaaaacgtggatctgtatgtcaacaattgtcgtttgtgtaccctggctggtcctggacaggggtttaatacacattcagcttagaaattctggttcgtgaatatctgggcgtgacaattacgagggggaactaaattgacaagtgatcataattatattttttcttaaaactaggaaggtagcccgcgcacatgcgcgtgcaccttatttaatgtgcatgaaattttgttagggatgtccatgtgtgggtgtttctctatctaaataaaaattgaacttatttaatgtgatttgaatgctggttataattttcttatgattacccttgcagcacataaattctaaactaaaattacttgagactgtacacttcataatttataagaaaatattatgtcgaaacaatagatgtagttcctatgagaaaattttggtcattttgacttctcgcatagatatcttacccccaaacatttgctcaaaaagtcatttttttgctagatagtatttgaagttttacatattttcattccattagctttgctagaagtttgaatgtttctgtttagaatgggttttcaaaccaattttttttttaaaaaagataatttttgttaaattttgattcttttcatgtacattttttaaagaaatttggagaattccactctatgaagcatatttgaaatgatttgatttctgcaatttgggttaaaaacataagtgggttgagcctacaacctgacatggggtaaagtcatctcttctgaattatctcacttcaattgagtaagaaatattaaaatagaggtcatgtaataaatacacattattatgttgtctataaaaaattaacgctagatggggtacaaattatgacgtaaaacacgatatcatttaaagttttcctctaatttattggtgacttcatagatcatatagataatttagactctatgatcatcttaagattatttatttatcttctaaattgatcattgattgataaaaaagcaccaaggtcatattatataggtaagtagcccccatatacatgttgagagaaattaataaatttgatagaaagtgttagggtctaacaggatataagtaatgggtcaaccagctttattaaaaattaaggtgggatattctgattttcaatgacgaattttagtatcttttttaatttattgttggcctcaagatggatgtgggtctagaatataatttttatgttagcatttaaatatagacaatatgaatattaatgtattgatttcactaaaaatataatagttcgaacagatcataagttgaatatatgatttgaaaagttataaatattttatttatattgttcctataagtgctagtaagagagagaaggacagggacagtgggatacatggctagacctaatatgtggaggttaatttgtggtttttcctccataaagattaatttaattttaattatcataatataaaaataagagaaaaggaacatcacaccgcacggggacgggaagggagggaggaggatgttttttcttaaaaaaatgattgatctaatgacctaaaataatgtgttggatgtttaagtcgaaaacaatggtcggatgttttgtttttaacttaagagagaccagtagtggtttagaaatatttataggatgtttaatgtatttaacattgcaggggccgagagtgaggaaataaggtttgtgagtttttttaaataaaaatctaataacaacctaaatgatatgtccatcgatttaagtcaaaatggtgttttgttcttaattttttatgattttctctaatttataatttaggagtgtcactgtgtggtttataagatggttaatgggctttaacgccgcataggagcgcggagggaggtttgggatatatttttttagaaaaagataaatctaataacctaaaataatgtatatagatggtcgaatgtttttttaaggttttctctaatttaagagtgctatatactcatcccgtcccataaaacctgaacttaaaataggatgtggcatatgcgagaacagcgaatttggacatgtgtttagaaatatttatatgatgttgattgaactatttatttattaggtgagaatataggaagttggctagatctagtaggttgatgggctttttaggcccataaaaaggtatttaatttaaattatatggggatttaaaaaaaggagaggaacggttggttggaggaatcgcacgtacgtgcgcgcggaggctcacgtccggacggagttatttttcttgtgaagatagatctaaatatgaaaattaatgggcccaccaatttaaataaaaatcaatggtcagattttactaattttttagagtgacacatggggacttaagagcatttataggataccacatggcagccttagagcgtttgtaggaagtttaatggacttttagtatataatagatagattatatgcaaatttcaatgttttctttaggtaatgatgcatcgtattaacatgaaaaacatattacaacaaaaaacataggcaggaagttatactgcatatacttatttatttatgaaatttagcatgataagaatgttgagcaaatatatcataagcggtgaaaatatcgaccgagataaaagtctagataaataggctttcatctatatcgattttgataaaatgattaacaaactatctatcttgcaagtattaaggaatatttagaaatttgagatggtagccatctaacgacatgattatgattatgagatattaataaaatgtagtattatacaaggaaaaggaaaaaaagaatggcatggcttgtgcttcttttggttagtgactaattaatcctacacgataaacataagaagctggaaattcagcatggcacacgatgtgatgctgttagctaagctgtgcatgcatcggcagaatcctatgacttgctctgactttgagtcactgacatgggccaactggatagagggcacacatatcagtgacacaagttagagaaaagtaagttagaggatctctatttggttgggttgtagtttaaggctgcgttcggtataggaagttcccaacccctcttcctcgttttctgcgcgcgcacttttcaaactattaaatggtgtgtttttttgcaaaaagtttctacacgaaagttgcttaaaaaaatcatatagatctattttttaaaaaaattagttaatacttaattaatcgcgcattaaatgctgctccgttttatatgccaggagtgaggttcccaaccctcactcccgaacacagcctaagagccttattggttgcctatattttctaataagccaaaacggcttattaagaaaactgtttaataaaaccaaaaagatgtggtggtttaggcttcagaatctataggctgtttaaccaagcccttcttgcccgtcaagcttggcgtcttatagaattccctgatatcctctatgcaagagttctgaaggcgaagtatttcccccaaggatccctaattgatactaccttcagttgcaacattttcccgacttggcgtgctattgttcgtgggctggagttattgaaaaaagggatcatatggagagttggtaatgggaagtctatctgcgtgtggagagatccctggattccacgtgatcactcaagaagacctatttctttgagaggtaattgttggctaaaatgggtgtctgatttgatagaccaagatggctcttggaatattacagagatcaatagatgcttccttggtatagacgctgagatcatcccaactatctgtctgtctcctcatttggaagaagattttttggcttggcacccagataagacaggccggttctcagtgcggagtgcctacagccttgcttgtaagctggcaaacactgaagattcgtcaagctcatctgtagtgggtacacacaaagcctgggactcaatctgaaagtgtaagatgccacagaagataaaggtctttgcctgaaaagctgcctcaaactgtttaccaaccattgtcaacaaaaaggtacgaaatttggagtcgacagatacctgaatcatttgtaatcaggagaagggggatactgctcacgccctctgcaggtgcccacacgcgaggaacttgctgtcagccatgttcaatgcaggcaacatctctcttgatgtggaaaaatctcgtttcggtaatgagtggctatttgacatgctggagcaactccctgcccatgagcacgagatgttcttaatgacgctatggcggaattggcatgttcgcaatgaaatcacccatgataaagcagcccctccgctggaagtttcgaaaagatttgttgaaagttacatagccacgcttttccagatcaaggaatcaccgctgaaagatgtggaaaaagggaagtctgtagcgagtttgtctgtcactggcagggtaagagacagagcttctgatgatcatcgagttccgaatcccgtattgcattaggtgaaacctcaggttggttggatgaaactcaatgttgatggatcctttgatgctgccctatgtaagggaggaattggtatggttttacgggatagcagtgggaatacaatcttcgcgtcctgtaaaccgctgaacagatgcacaggtgctctcgaatcagaactgcgtgcctgtgtagaaggtctgaatctagttctccattggaccctgctcccaattctagttgaaacagattgcatgtctgtagtgcaactgttaaatgatggggaaagggatcggtcggaattggctaacattgttcatgaggctaaacgcttgctagccgggactaggagaattctagtcagtaagatccatagaagccagaatagtgttagtcacctgttagctaacagggccaaagttgactctgtctctggggtttggttggaaggaagttgtaattttatcttacgtttagtgcgtgaggacattttaagagagtaatatatttcttctttccccgcaaaaaaaaaaagaaatacaagttaatttatatataaagcttttatatatttgttcgtagcaaggtaaaagccaatgctataaagaaatttacgttgaaaataagttgaaatcaactttaaattcaagttttaaaattcaaactttagcttttgctttgtgttattaggccaaccgatgaggctctaagcagttgtgttgggggaggctaggcctcctcccgccccctggcttcatcccttcgtgattgacaagtgcacaagcaaaacgaaagaaatatagtagtccctctaccccaatttgaccgtccactaagattttgaggttttttctaaatgaccatcatacaataagtgggagtaaatgggaatcgctgaatgcgctgcacgcatgcaaccgtatgcatgtaactagccaagattaatttctgatggtgtaactaggtatgaaaatggttcataaagtttcctatttcctgagaggtttttgaaacggaaagtgtcagtcagaattttatcggaaatttttagaaatggaaatgaattcagattttttttttcaaaatcggaaatgaatacggtgaggctactatcggtcgaaaaccggaatcggtcagaaactttccggagataaatttgaaaacttttcgaaaacagaaactttttatatatagcttattagcttcagccttctctactctatatatgtttagatttctacataatattgagatggttagttgaatgtagataattttttagtacggtgctttagatacgtgtccaccccctacagtagcaggctcaccatgagcttctcactaggctcccgcgccgctcccttcctgtctcccaagggtgtgacctgaggaattcccgcgctcacaccgtgatctccgccggagattcgccggcgacagggagcgccgccgcgtcgccctagaatcgtcagtccatcgcctgacatactcttcagtattcctattcctttttcatatgacttaaaaatcgatcttatgtttactacaccatctaataacaataaaaatactaattaaaaaagcgcaaggagtatcatttaagagcgggttgtttcatgtgtggttgccaccacttccacgtcgctaacagacttattaattgtaaaagtaaggtactctgttcatcgtactccgtacagagtagcatcaatgatagaaacttcaccttttttttaatgtttgataaaatgggatgcgtcacctacggatggaccaacggattgttggtcgttggtatagcaatatcaatattattatggctcttagttgactcaactgacaagtctacgcctgctcttactatttaagaagcttccaatgcgctaacgcagcccagcgatctgcgcgtcacaactcacaaagccggggtagcttgaggtagtggtgccctggattctaaggtataccttgctatacactgatccttatgtaagttcgtctgtaatatatacacgtaactggtaaaatttgtccgtgcaattgcactagctagtttctaatattatttcatttcaagcaaattagttacttgctccggcctaaatatagcggcctaatttgatatacaaaggcagcaatattttaaaacgaaaaaaagtgcgtgatacatatataatataatttcttgatattgtttgttttttcacgtgccctactgcacatttatacctgcgaatatgccccctttagcacattctcaaaagttggaagccaacaggaaatctttggtgtcgctaaaattcttaaattctaggtgtgtttagttcgcaaaaagaatttttttagttgtcacatcggatgtttgactggatgttggaaggagttttcggacacgaatgaaaaaactaatttcataactcgcctgaaaaccgcgagacaaatcttttgagcctaattaagccgacattagcacatgtgggtcactgtggtacttatggctaatcatggattaattaggctcaaaagattcgtctcgtgatttccatgcaaagtgtgtgattagtttttatttttatctatatttaatgctccatacatatatccaaagattcgaggtgacgtttttgggaaaaaaaaattgaaaactaaaccatgcctctttaaaaaagttgtgtcaaaacctgcgcaattttagatactagtatttaactgtgattggtggcgtccatgcctcctgcaatatacttgccatgaatgtccacgaggatattttatattactccctccgatttcatattaattgacgttttagataaggttgaagtcaaactttataactttgaccatcaataattttaaaaatatttagtttaaaggaactagaacaatatatataaatttgtctttcaaaacaccataataaaagtaaacatatatttatttattatatatattataatagaaaaataaaggtcaaagatatattttgtagaccgtgttcttgtccaaaacgttaattaaaatgaaaccggagggagtatataaaaaagaatagaatccattccagagttttagcactccagaaattttggaagttcgattgtgaaatgccaaaactgtcatcaatttaaagctgccagaaaaagggtaggtgatatcaatatattgtcgtgccaaaaatatataaaaatatatggttgccctgattcctgtgtgaagcaacattttcactgcactgctccaaacacgccgaaggaggaatcaattcaccatgatccactctagctaggacccgtaaaaaatggacagtttggtcagcaggctactccctccatcctagtttaatcatcccctaactaaaggcgctaagaacaataacagcaaaatattcatcattcttaaaattaatcctctcatggattaagtgttccatcgcttcgtgtcttatggattgctaatggtttaaatataatataaattaatcttgtttggttgcaagtaacacattccaatgatacacatttagtactcttaatttgcacaaataaacgaagatgatgattattttgaaaaggccttaaaaatattaggggatgattaaaatgggatgaaggcagtagtatttcagagcttgcttctccatgtgaacattttgtcaagaatgagaatcatcggtaattcaattcccgtaagggctaatacgtgaaacggattccaacatatattagagttagggctccagggtgagctaggtatggagagggccagaggggacgctagggagagaaaaaaagagagtcaggagggcttttgtgctcagatggttcgggcttctaaattactgttttatattatgataactagctgggtggtccacgcaattgcgcggctagccaaaaaaatcatttttttaagtatgattttacttaaaatttattaaatagctatctcattgttaagactttgaaagaccaaaccttatcatcctcgtgtttctaattatatagttttaaaaatcacaccaattgctaccccttatgtcatcttctttatttgcttgctcgatctatcactatttctattcattcatcttggaacatttaaaaattagattttatagtttttagagtttattgtcacgttgggtttcgtttttataatttctagatgtcccgtcaaacgttgccattatactcctatacagcctgtccactatctcttctcttttattgtcattgagattttaaaaatcgaactgtgacgccccacacttttatctttagtgataaaagtgtgagaacatagattattatttaacaaccattattttgccaaataataatccaccatcagagatcgcaacagagaaatagttagaactacctttaattcatccctaggagcattaaggtcatctctactccatctagagtacactcataacattgaatagagtttgtagcaactccccgtagactcccatccaggagatagtcgtgaatcacgatttaatttagcactgcgcaggcttgtatcactgtacccatagctactcttaacatgtttgactgtcgcacttcactagatgcggcaccatgctaagagtacagaacttttcccctacttcaacttactacactccacgtttgtgttgagcctatcagccctccacaccaccgcgctactatatgcgcctggaatgcacttcatcggcattcatggggtttatatcatctcccatcctactactacgtacccatgtggagtataataaacttgataaggtaccaggtccagcccgtcttaagacgaatctatggtcgacacggtatatacggttctttgatacgagtgagggggtgattagtccttatatttatacaccgtatgtagggagagccctgacctgccatcatcatcaatcatctcatccctgagctccccctacccaccatactagtatcctgatgatctccatcatcatcggcttgtcaatcatatcatcatcgttcatttcattatattctagaaaatactttttgatgcaatactaggagaaatatttttatgaaatagatttttaagttgaaatagaattatcatctaccaacatgatcaaaagagagacttgcctgagtttctgtagccggtactatcaaatgacccaatttctgactctagccttttccctgcattttattgtatacattgattttcaattaactttcaaacttgaagaatataattggcttatctatctatattacagtgcacctaaaattctagcctgatgtacaatttctagcattccattaatttgtattgagtatatatattagttacttgatttaaactagacttgatttacagatttattgacagagttttgctaagcttaatgttagtgtagacaactagtgtgcactaagcaatttaacccttattcctgctctcctcacttatgtctctctctctctctctctctctctctcgcacatacaacaagctgcatctagttactcatccccttcttccattttcttggctgttgctgctgctaatggctttcttcttccccaactctgctcctcccttccatctacagcaccacccatggcgctgccaccccggcgcccacggaggtcgacgccagccaccaccactacacaccccaagctagctcactgcaaatccccttttctccccctcccgatttctcctcttcctcccatggtccaagccctaccaacagcgtctgctttctctctctgtgtgtgtccctctctctctctcatgctaccaaatggatgtgatgccactaatagtgatgtgaaagtgcaggaaaatagtgcctcgtgccatggctgctctatgaggtggcaagaatggcaagatttgaggggctcacctttgtctaagggacaagttcctccatggttgtgctcccgtgttcgtcctcgccaatgtgttggtctcttctcctccttgatagatcatctccttgtctagccaatttttcttctccccttcctagccgacatagagatggtatgagtatttggctgagaactaatttggctactaactattgggattgagggattggttcttgaaatggattgggcagaatcttgcattccgctgatttgtggattttgggactttggctattccctcctcgctccctattgctctcctcctcccctgatctgctcactcctcaccaagtgcttggggctcatatgcatgcatcagtgagcaaatgggcatggctgtagccatgctttgactgcttgactgagaggtgatgaggttgtgctactacctttgtggccttgtgtgagtcctcctatgtgcagctatgtgattggtggaaaattagtactgctggtgaattgaggtccctttggtgaggttacttctttatatgagatgtgtgacttcttagtgttaattagccggagccggatgacgaacccaacttaagggaggggtgccagacggtattagccgatctaggtatctcggtgaatggttgaatatacaccacttcgtgtatgggtctgacggcaatatttatttacatattaccttttgtgcataaaagggtcaagctatgcatgtcctgtgcaaccgtatattcaaatatatgatgtattgtattattagtgtaagtgtatgtatatgctgactgtttacagtggcgtttgtttgtactatatttccaattatcactattatattgtggttgtatattggacattgtttgtttgtttaacttcgacgaatgtgaatttcataaattttgagtggcttattcttatttccaacaattttgctagttaactaattaattagtgatatatgccacttaatttttaatttttaaaatagcttaaatttccgggtaacataattatagtttgggtttatttttactttccaaaagtcccgccaaaccatcagcggttttgccattgtactcctctacggctcgctcgctgcctcccttctttattgccttctttattgtcattgagatttaaaatagaacatgattatcattggttttttttactttttagaatttctaaatctttaaaaattggacttgtagttttattttttataatttttagaagtctcatcaaacgatgccactatgcccctctgcagcccgtccgccgcctactctttattgtcattgtgattctaaaaatcgaacataactatcattacaattcattttttattttctagaagtcccgtcaaccgtcggaggctctgcaactatactcttatacaccccgctcgttgcttctcctttttattgtcattgagattttaaaaatcgaaaatgattatcaatgtggttttctttctttatactttctagaagtcccggcaaccgctttacttgtttacttcacggcatacctgatgtccctccttttaatcgtcattaggattctatttggtgttttattaataatttttatatgccgtattaaccaccaccaactctactactttatagccatgttacttaatttatttcgtcatgtgttttagatggtcttttctttcaatagtctttatttttatcacaaattttagttatttataaattttattcctaatataaatcttttttttctaatttcagaatttattttttctaaaaaattagttaatattgtattgtgttcttttaatgtttttattttttattttgaattttatttgtttcaaaattgtattcctacttgaactctgttttaaattttctaattttggatattattatatttttattcgaaattttaattaatcttgtattgggttcttatatggatttttctttcaatattgcttctttttaattacgaatttcagctaactacttgaactcttctttattttcttttgctaatttcatatttatttttatttttattccgaattttaattaatctcgtattgggttattagatggactcttcttttaatattccttatttttaattccgaatttcagctatttttaaattgtattcctacttggactctcgtttccttttctaatttggattttattttatttttatttcaaattttgattaatctcgtattgggttcttatatggaaacttcttccaatattgcttatttttaattccgaatttcagctatttttaaattgtatttctacttagactctcctttccttttctaatttgtgattttattttacttttatttataattttgattaatctcgtattgagtttttatatggaaacttctttcaatattgcttatttttaattccgaaattcagttatttttagattgtatttctacctggactctccttttcttttttttttctccgattaatgtgggaatttctaacccccacagcgaacgtggtgcctcctttcaaagctattttaataatataatagatagatagatagattaccgtatttctaaatacaccaatatttattatctatttctttatttgacccataatttagaagcccatcaactcctcaaccaaatatatgagtgcaaagttaaaagggagacaatttgtaatttgcatagtgtatccttgaattaattttcttatattatatggttatgcgaaataaaatgtgtgattttagatatttgttattgatttttgtcgataccaatgcattttcgttcatattgttctgtttttggtttccgatattattatactgtttttattttcgaatttaccgttttcgtttccaagaaaacaattgggatgttttcggacctttttcatcccaggtaagtggtcaaggcgcgcgattgtacgtccattacacgcactcggtaattccagatgcaaaattgatttaccgctagtttccaatttccaacgatgcaggtaagatccacagcaacgccatgaacacgcaggtcgacgtcgagaatgtggacgtggtcatcaagcctagaatggtacctgcccatcagggttggcagactagcctctgcgactgcttcggagacggctgcgaatcatgtatgcaaagctacgactgactggatttttctggtttggtggtacaatgcaatgttttttccgtttcatggcttaatttctcgacctgttggcagtttgtttgagtgcttggttcccttggttgtcgatttcctgcatcggtgaaatcgtcgatcaaggcttcacaggtaggggtcatctcctctcccatagccccatccaaagtgctttgctttggaccggttaccgataaaacagaagagcgtttggattcagatataaaattaaagaaaccatcaaactgaatttagatcgaattaatatccgctgatcaggtggttaattaattatcggtattcagtttcaaaattttgcattttcacgcttattattatatccggttacagatatgtatgtgaagattttttacatttgcttaccgatatgcatgttttctctcttgtcaatttccttttggtctcctcaccaattagagtggtgctgtatctgcttcatctacctcattgccgcttatttcggcgtgtggtgggcgtacgcggggtggtaccgcggaaagctcagggcgcagtatggcttgccggaatcgcccctgccggactgcctcacccatctcttctgccactggtgcgcgctggctcaggagcacagggagctcgccgcccgtggatacaacgtgctgaatggaacttactccctccgtttcaaaatatttgacaccgttaactttttagcacatgtttaaccgttcgtcttatttaaaaaagtttgtgaaatatgtaaaactatatgtgtacatgaaagtatatttaacaatgaatcaaatgatatgaaaagaataaataattacttaaattttttgaataagctaaatgatcaaacacatactaaaaagttaacggtgtcaaatatttaaaagggagtagtatactccctgctatatatgcatgtgccgctttagacgacactgccaaggcgatgcaaaccccaagatctaacggcgttttctttggcgattggcatatgcaggttgggacggccggccgcaggtggctgcagtaccgcctccgtcgcgtagtgcgcccgcagtccaggctccgatgaggcgatgaaccaggagcaaataaatagctcgctccgtccaccgaacgaagccataagataagtggcccagtgcgagctgtctatctaccaaaattataacaaaattataatagaaaaaatgatacctcgtgatatttttataaagactgtaaaattacttatctatatatctatatccaacagctgtgtaaagaagccaggcatctgaataatatttgacatcgccctagtttgataaactaggaagagaagaaaagcccgtccacataagcaggcatatgtttctcaaactttttattatatatcttaaatatgtgagatgtatatctatgtgtcttctttaagaataatattattctactttaaatttgttgtatttttttttctcactataagtttataagttttagattgctctaaacgttggttatggttttattgcaagtatccacgcagtggtggatcgaagaattttcttgaaactccgcaaagctaaaaatagataacaaatgtacacaatttcatactacttcaaaaaacatttactatgaacgtgattgtgattttttaagcatttgctttgctggtttgcttaagtacggtaattaagtacttcctactgttgtatgtggctggatggtaaataatcacataaatcaagtcctaatctactgctgtgtgcgttgaagcccgggcagctgcccatgtggctccgccattgtatccatggaacaaattctaaactaaaattgttaaaactacagaatcccaagactatggaatcttgaatttatgtaaaaatatcgtgttgcaataattctgttagttattgtgaaattatgaaactatagatgttcttttgaattttttagcatgcttctagaattcaagcttctaattccgcttcagagtgcctcgccagcatattctacgacagaaagtttgacgggtgtcaattggaaattccacattagctagggaccggattttccagccggcagcacggagaaggcactgatgatcctaggtcattggtgcaactataacctttgaggtgcacacgatgcaaaaaaaaaaaaaaaaattgaggcacacacgacgcaaaaaaaaaaaagagaagaggctcgattcggtcgaatccgatgctttgagtcactccccgttgccccagattacaaatcgaaaaaaaaaacaaacttctgtacatgctaaactttctgtacaagcttaatcacatttttttaaaaagaaaaataaactgttgcacatgctaaatcacaaattcaaccaaaaacagaacctctcgtcatcaaacggataggtgacgtgacatggaaagggaaggggagcatggcaaggtacccagatctagcggtcattgagctcgagacagcgccctcacgtcaccccaacgtaggggaagggggtgccctacatgttgtacatgctgtacatggcaaggtacccggatcttattgatggcccccgcagcagacccgtaccagtggcaatatccgcttccccttccccatccccttccccttctctacctcctccctacccctcaccgcctccggcgaacaccgcgccacggtgccagtggcctgcacggagggtaagtgcgcgtggggtggggggggggagcgtcaggagtcacgggagcatgcgcacgtgggacgcgcatgctgccgcctccactcatgagtttagggtcgagtcgggagagagagcacgcgcacaaggggaggagaagatagggagaggataaggacggagagactcggtctattggctcagcttaacggtctaggatgcttgtttatttaaaacaaactagtacagataaagtgataatattataggtgccaaattttattaataaacggtacctatatcgtcacataggtattagatcttctaaacggcccatgggcatgtgctcgagccaaaaataggtgttagttatagactttctgacacctataatactatcttcgttttcgtttatgttgtagtgatatgaccaagttatgggttgcagagagctttacatggtgggcaagtcgctcgtcactgaggcagagaaaagctctaggtcgcctcttatgctttgcataacaaatgttttattctcttggttcaaaccaaaatgttggctccattttaaaataatatttaaaataattgctggtggatgatgatgtggcatacttgcatgttgagttttaaaagttagtaggtattgactttatagtaagatagaatatcataaataacacaccgatacaaactttaatttctaatgttgcagatcttatttcgtcatacgtatttgcaaagctattgacggtaattaggtaccaaatctaaccatcaatccctacataaaagcaaatgaaagaaaacatcaaacttggtgttagtgattattactaatcattttcacaagagttggtggatatttttatgcaagtgaattatggaaacactgctactcccgtcccgagctgaaggctgaagcactgccgtgctgccccttcctcgagctcgagcaccagcaacttcagcgctaccatcatgtgcttgaactcgagcttgagaactagtatcgtagctgaccttgtgctgatctactactcctcacatcccctccctcctgatgatcggttatagcataccaagaacagagtgcggtagagcataatagcaacaaagagagggagcacgtgacatcggttatgggctgcctaaattggaaaaaaaattgggggtaaaatatttcttggcctcagtccttaaacggcagtgctaatgttattttcgtctaatcgtgttcatggcttcacttggtaaaatagtatagccatgcatggaactaaagagctagtacctgcaatggagcaagtgatgcatgcagcgcaagattcctagcatggaggcatggagatatcttatatgctaatctatgaaggtagaaacatgtacatcttccgaactttgttcgatcatgtgctttttttatcagatttttttaagatggtttatctcatcgagagaatccattatatgccactgactttgtcacatgtctacaatttaccactgactttgtcacgttctacaatatgtcatcaacttttgtttaacttctacgatttaccatcaccgtctagttagcctccgttagcactgtacaattttgtccaaatgaccaaaatacccctacgacaaaaacttctaaaatttagataaaattatcaaaatatcatattatgaacacaagattgcaaaacatccaaaatttggtaaaaaaaacttaaaatctaacatttcagaattcttatccagattttgaaggtttttatcctaggggtattttggtcattttgataaatttgtgcagtactaacggagactaaccggacaacgatggtaaatcgtagaagttaagcaaaagttgatagcatattgtagaacgtgataaagtcagtggcaaattaatcgtagacgtatgacaaagtcagtgacatataatggattctctctatctcatattgctaggcatgtaaatacaagtcctcttgagatagacgcctacgcctaaacatttcaccatgttctttctagccttagtcttacaagttatatgtttccttccagggattcactcttttctgttgtcgtatttatccatgtttgatatgatgtagctttttttttcttctcaactataaagtttaatgcttatggttctatgctcaatcatatgtaccatgacccagcatggctctttgtatgtgatatggttgccctaacgcaagtattactttgtatgagagttttcctccatagaatcaacttactacaagctttgttgcctaggcaaacattcttctaatgcaactaatttccacagcaacgtgcggagtatcttctagttaaacacatagggaagacaaattgatttgagatgattaaagggaagacaaaatgattaatcattagtacgtgcacacaaataattatacatagacgagaatagagtcttgtagcaacacacaaatacatataggatacatatccatgacactcatggatatgttacttatttttgaaggtgcagactcattgccacctatccattatacacttcatctgcaatggctttacggattgtattcatcacttcctcgctgttaggtgcgtcataccaaacacataggggtggagcctctgggatgttggggtacccattgtataacaggttttgtgtcatgaaatgcgggtctgaactgtcaagcttgaagttgtggagagcaaacgtacagtgtgtgatatttgtctgatcgttctgcccaggaaagtaaggtatttctctaagaattctccactaactcttgataactccaaagctctttccattgtgttacacaaaaaggagtgaatgtagttaaaagtctcttcctttccatgcggtagtgttgcttctgaaccctcaaaatcatccaagtggtatcgaacatgcgggtatggaggtaggaatccataccaactggcataacccgagcccacaaggagatatttgcttgcacaaataaaatattcagttaatacccctatatggcattaacttgtttcattaaaaaaataaaagtgttgcgaaccccatggaaaccttggaaatatgtagggatagcctcgtactacttctatgagcaccctttagtcgtgcatagatcctggttatcccgcatctataaatatgacacgattgtcccatccaataacaacaagaacattcctagatttgacatggtgacgattccgtgttgaatggaatcatcaaatgccacaataacaggaatgtgtcccatccactgaacctgccgcactagcaaatggctggaaggcctcatcttgcatgacacggttatccactctagcaaagttaggatctacatgcttatttatgtcaattgtaattgcatagacaacattaagcactctatggaaatactttgacacagtagatcgtgaatggaccatcctattatttgtcgaccgattagaatagccacctgccatgttgtataggaatattccaagtgcttccatagggtatatctcaattgttccgtgaaggttataccgattagtgagtagcccaaacaaagcatgaatctgatcagccctcattcgaaatatagcttggcactgagctgcattggacattgtttccatcattcattccatctcgaattgttgcgggacccgccttgcggccttaccacgcaattttgcctccaaactagcaaccaacatatcaagaatgcaatcttcctcttcactgaagtatccatcctttgaagcatttgttctttcagacgaagtgctcaagttcccatagcattatatgacaaaataaacatggttaaggtacaagtatgaatggtgctaataggttttaactttattatcgttcaactataaacttagtcacgatgaaaaaattataagacagtacagaaaatttcagaaaaagatggaatacggacaaagaacaaatgaggtacgaaatacttaaaatattagcacatgtcaagtaaaattcgtctcaacataatttattcaatcagtgcaactgatagctcaaattaatggtgccgaaattgttaaactaaacactcaaattaataaggcctagaacaatcacgtttctcgaaagaaatcgaacaagttatttaacggacatcacaaggaaaattagagatgcatgacaaagatcgcatggcaccagtacgataatcactgccttaagaaatgttaaaacattttaacattgctgcaccatctgctccaaccgtaccatcataacctctaggcccaaatccacctccaccatcaaaccagcctccaaatccattagcaccacctgagcatgttggtggtggagcaaacatagtttctacctggtagtgcgagtggatgaagtacacaccttcctttggtgtgatgcaatcatcaatgaagaactcatgcaaatacccatcacgaaacagcttcagtgccatgtggtacagaggaaccttcttggtgatgccatcagccttcagtagctccatgcaagctctagcacttttggcttgcctctgttcctcccttctttctttgctctcattggactgcacccttaggtcagccaacctattcagagcatctccagtggagtcaccgcaaatatgcttgccgctgccactagagacactgacaggggttacgatccttttttcctttaccgcgcctcctcattgaagaaggctctggagatgcataagtagtgccatctgcatgaggtcctcaacatcgaggatcttagcctcctaggacacctgtgactgtgccggcttggacctaggcacaccggagcggtttagcagcacagttcttcctctgtaaacaacatgatgctcagcgttgaatctgagcggtgcatttctgaatacacgcgctcctcttctaagctacacaaattacagcacatagttggtttaatcagaaaataaccacttgtatgcatgtacagatggcaggatatagaaatggcagcacatgtaaacatgtaagcatgttcaaaacagtagaatctggaatcaaatacacataggcacacatttgttataacaaagtatataacagtagcaagtgaaaatacatgtagtgcagttagtgtacacatggcagcaaccatgtgttgaagttaagaaaaaaaaaacggaagcatatcaccttctaccacaatacaactgagtagttaaaataagtgcacaaatatgcgttcataaattgtagatgcagcaagttggtacttaaaagataagttttatttattgttgtcattacatctaagataaattaaagttttgctgcaaatacaacacacaattcagttatgtggtttgatcacgttgttgctggaaatattgttttagatatgtaacacatgccaactttgcaaacaataacttcagctcctaaatctcttgcttaatacagaataattcaaacatgtgcaagttcaattatcagtaatcctcaacacatggcactaacaggtcagattttaattacaacatgtcatggctgatcgccttggattattttgcaacctatgcatgctgctcattgttatcatgataaatacagaaacattgcagacatgttcaaattaaatgtgctcttgtcatctacacatggcatgaaaagatcatagtagagagatcagaacatgtaaactttaattcagtaccctagacagatcagaaaacattcaacattcaatttaatttgcagaaaaaaatatcattttttgtaatccatacattgagctcatacttatcattctatgtacaaaaacattgcacacaatctgcagatgtaatatcagttgtgaactacacatggcatgaaaagttcatatttttctgtgtttttttgagtgaactacacacttacaagtttcattgtgtttttcagaaacaaatgtctaggtttgtgatgtatacattcagctcaaaattatcttggtatatacacaagcatttaaaagaacacacatatttaattatcaaatgtggtgtacacatggcatgaacagatcatattaggctgttttaaattaaggactacacttgtgacaaatatggtgtacacatggcatgaacataatatattgttaataacatggcataattaatcataaatgtagtttgacatatctaggcatagaacaagtggtctgtaatgtcatgtactttgggatcaacattccaaatatatgtatgatagttaatcatacatctatacacctatgtataaagttttgatacactggcatctagagtatatctataaacctatatatgcatgaaattctgctacaagtttcaatgtaattttcagatacaaatgtcaaattttgtaatctatactttgagctcataattatcttggtatatatagaagtattctaaagatattgaaatttaattatcaaatatggtgtacacatggcatgaacatatcatactaggttgttttaaattcagtaagactacacgcatgacaatgaacatatgaacatattgctgataacatggcataattaatcataaatatagtttgacatatcgctaggcatggaacaagtaatctgtcattcgaaatactttaggattaacattccaaatatatgtatgacagtaaatcatacatctatagacctatgtatgaatcatgcatgtagaggcctatgttttgaactatgctacatctggtctgtaatgtcattcatctggaggcctatgtttgttaaagctcctactctatatggctctattgatccactgatggtggtgtgtgaagcatctatgttttcaaatttgctacatgtaatctctagtgtcatgaactttaggaaaaattgcatggcatgcgcaaaatggaaaaattgcaaagttaaactatacataacccttccatctgctcccaccattcagagtttacttggatggagccagtgtagggatcttgccccagatcggtggccattcattccagctaggtccatgtttggaaacggtggcgacagtggtcccataagttcttcagctactgcttgttcatgacccttctcgtacatcttgttctgcagattcatgtatccttgagctttggggcagctggaggtgatgatgcagccctcaatttcttccatgcagctatccaggaatgctttcagctccgcctacgtccaatgggtgtgaccgccagccatctaacaacccaagtcaagcaagcaagtaggttgaaaataaaagctagaacttgtgctttacctttcttagggcctttacagtgcacctacgtggcgagttatcgttttccatctaggccaaactctgacgtggataaaaaaaaaggtggtggcctggtgggacccgtatctttgcaaaggtttgcatctcctaccaaggatccggtttcctcaggcccaaaaagaaactgtgagtggtcccctctcccatgtcgcgtgctactactctcaattttcccgattattcccctatacgtcatccctctgcttggctccaccgacctcgtcgtcgtcgattcgccggtgggtccaccaccgcctcggcttcctcaaccaccgccgcgtccccgtgcgagtgggcttgagcggcgtccgggagtggagaggccccgatagggataggagagaggcccgcggtggcggagtttgtcgccgaggtggggggagtggggagaggccgccagcggcagagttcgtcgccgaggtgaggagaggacggaggcagcggcatcgctggtaaactcgccaaggttggtgggtggagaaaatggagaggattgtgcagtggtggtgggtgcctgggtggggttgagatttgtattatttcctccactgtaaggtgttcattgtaaaatttgtacttctttctaaattgagaaaaatatgagggctaaaatcaaaagtggtaggagctaaaacgaaaaatcgaagtcacccatgaggccatttgcactgtggggaaccaaaatttggacacagtatctttagtctatgtggcagttttaggttcttcaaatgggtagtttgcattactactgcccttggtgctacgagtcgagcaagtcccaatcgagtgaagatgcaactctggccggagtgaggcggcggaccagctgcaagatagcttcatggaactttgcagcgatgatgatgagtgctcgcgctacggcctggatgtcgtcttcagctgtggcagtgtagctggcgtcggattgcagagacttggatgaaccctgagaggatttcagatctaaagccacctctcgccgttttgccgaagtaaatggcaactgtggagaggatatcaagggctcggtggtggagtgctagagatgaagcttccgtttcacgcctttggatgccatggccggatccacaagatggcttaatatagctatgagttcaagtccccctctccaccaattttggcaatggcgcctccttggatgccggatgggacgtgaatctccggccctattcggcacgagaactcaccagagcagcagacgcgcgctggagaggctgatgcactgtcggtggaatcgacgccgcgccgatgcttgctgcgactgtgcctctcgttttttctccacctccaatgcgctaatattcgatctaagtgcttctcccctactccctccgtctaaaaaaatttaacctagaaggggattgttcattattctaggaggggtcacattctgttataggttgagttttttttttttttttgatggagtgtatgtgcctggcaaccctcctgcccaatgagccatcgacgtcgagcgcatggtctaccgcttgcacgccgctcaggacaagcaggagccgatgcagatctcgattcgcctccgtgaccaacggttgctttagtgttcggaggagaaagatgagggactccgcaagaacaggtggagaaagcaatgcacgaacgagcgaccgaaagctatccacgccgtcaccctcacggttggcttgaacagtaactcaacaggccagtccatctcgcggtaccgagattattgcaccatcttaatttcagcccatccgaatcccagctttccaacgggcccaaaaaaatggtccaaaccaccgcattccagaatgtaattcaccaggtgtataccattgccaatgcgcaagctgagcagatcatgatcaaatgcatagcaatgatctaaccagtagtattatactatcatatagtactaatcattcaactgcattcaaaatgagctggccatgaaatcagtctcacaattttccatggttttaatcagagaaaccaactcggcagacaaaaaagggtatcggaactgacattaagttttgatcatccataatttagtaacagcccaaatctcctaaaaggtaaagcaactagcaacaccatctctactcagctgctgcaacctcccctgccaccgcctcgtcagtctcagcaggcctgtccagcttcataccgacatcttccttgtagtcaccgtgtacctgtaaaaccaataaagaccacattttctcagaatctatactccttttaaacaagggcaatggtgccaccaagtacagtattatttttatttcccacctactccatcatgttttgtaccaactatccaaactatccatgattttatcatatttcatctgtaacaacatctacaggaatgaaattgtcccaaaaacctcactattaattagatttaatccacagaaaagcacaggtgtttggctagtaaagttacgtacacacaggaactaggagtggaaaaaaaacatctggcactactgaggacatcaagaggcagcatactgaggccaatttgtgttggctgccttcaacgttatttgaggctgttaacaaacatgttttgtacttggacgccatatcatgtttaaatttacttgctacattctgtgacagtaaaaaaaagaactccggccaggtcatttagcccccctaatacttgagtaagtcttgcttccaaatcaacactacagtacagcactatttacagaaggcaagccctaatataagatttgagctaatattggctgcctaagagcacaaaattgcctaggaattttttatcaggaaaaattatctaaatgcataatgtcataaaccctaaaatatattgttaaaactcggtattgcaacatcttacactaaaagttagtattcaagtcaaagcaaaatcctgaactaagtattttagggcagccaggttatagcaggggagttagtaaacatagttgattccaacacatagcaaatatactagatagattttctaataagattccaaagccaataaccatgctaatacatttctcagaagaataaccaggagcactaaaggcatctagctaggcatgagaataaggttcctcacctccatcaacttcccaagatcaaacttcggtgccttcaagatcttcaccttgcggatgaacacattttggagagggaatatacttgaagttgacttctcgatctcctttccaatgacttcagggatgaattttgaaaccagttctttcaagtcacatgttgatgcctggttggccatgatctcaaccatcttccggcggatcttcaaacagtggacaaaaataaagtaaacaacaagaacatacctcatctcaaaaaacaagaacttacctagtacagaacatgcaaaaaagtatgacaaaacttttacctgccggatctggctagcctgagcgtaacaggtacgcttcacctgatttgggcggcgcttggtgaaaccaatgcaaaacaggcggagcatgtagttatctgtggtcttaacatccacatgggcttcaatcaatgtttgccatttcttgaccaaggacctaagtttgtccgtggtaaaactcatgccctagagaaaatatgtattggtttagactacataggacaaaagggatcacagatacaacacaaaaggattaatgaacaatcaatgctcattcttacccagaaattcgtgaggacattcctcccctgaacatcctcagcacgaagtctaaccttcctgtaagcctgatcctcgtcattctgaagatccgccaaggagacttcaaagacacgatgcttgagaccctcagatgcaatctagaaaataatttcatgaataataatcagcaacagacatagtgctgtaaaaaattcagataaccttaggaagattacacaaagaaatatcttgggtatttaaacatcagactaaaatatctaattagtgagaacacatgatagtgttactgaaatcaagcatttgatgtatgacgcattaaaggcagcaaacattaaaggcagcaaaaaggttactccaagtacatctcagcaagaatcaatcacctcaagaacttatatatatgattagtgttcatcaaatgaaatgaaacattccatgtatcagccataaaaatctaggagagtagaacaagtacagcacagaagaaatcttgccagaactcccacatttgcattaacgaaacaaacttctagccaaaacataaaaatgcatcaagacatcacaatcacaataactacatcaacgccaacattaatcccttagcctactcagatatagaatgacgcagccacgcagatccaaacagatagattccgcacatgtactcacagacagtgatacaaaatgaaagcatggatcagatcgcggattgaggttgacgggcgcgaatggggaacgaacgaacgaaccttggtcccctgggtcctggagacgagggtcttgccgatgttgcggacggagaacacggtcggcgccttgatgtcgtaccaatccttcttggaaaagggatcgacgctgcacccacacggagagagaaaaagagaagaagtcccaaatcagaatcccccaaaaaccccaagcaagaacaagcagctcagagaggacgagaggtgtggcgcccacaccgcccgcgcgcaagcagcttacgtcttcttcttgctgcccttcctgcccttggagatcctcttgttcttgcccacggccatggctgctcctccctctcctccggggttagggtttgggagtgagtggcggcggcgcaggtgggagaagaggtagaagaggcgaaacctagtggcctgggtggggttttgtaagggaggggtggctcgatcggacggctgggatgtgccaagccgcaacacgaacttagcccagcttggtcgagctcggctcggtgaagctcgcaagcgttacaagtaggaagaagagggatttcattcggctcgatttccagtcgagagcccagcagaaaacgagtttgcaacaagccgagctcaagtagctgagccttgaggcccatttggagttccttttaacgtgtgatggtttaagcccaagtatgggaatcagacttatatttagggtttaatatggatttgttaatgtgtagtctgattatagttgtataaataatttgattttttttattgatcttcctttagccctttgcttggactagagtgaaatcgaattcttaaattataattgaactatatttgttgtatttgaattatctccccttttataattcgtcaatatattgcttgtgtttgtgtataacgtatgaccttgtgattagcgaattaaattggtatttgattcccggacttttattacatcataattggattatatagaaaaaaattggtgtttgatttctctgtgctttatttgatatttgtaaattagttcatttacattcctcggtaggttttggtatttaattatttatagttccgttttaaggtgaagttccacataactcaagcaacaagatcctagaatgatgcaaaagttggaaattttactgatctttaactgaatatttagggtgttacactttctctttcgtaaaatctatttggagaggcctcttgattttgccttaactagtgacgtctaaatacggagaaacgtggagaagtccagctactacatggtactacatgcatgcattttttttaatatacatgtacgtccctttcctcttcaaataaagttttctctcaaattacttatccgatctacaatccgattacaccattgtgttcgttacaattaaatcttcacaacaaaatcttacgtgattatattacgatgaaaaaatatttatatttataaattacttttattatatatgtaagttactcttatctcatatatatatatatatatatatatatatatatatatatatatatatacatatatatataaaagttacttttagagttgactaaattacttcttagacatataaaagtaaatttaatagagtctaaaagtaatttacatatatttgtcagagttacggataaggtataccctctacccttggatgtacgctatacgacaatatggtacatctgcgcgtgtacggacgttctctgtatacactaaggaaatccatcacgaagtccaccaatggaaaggttcctacccgtataggactgggtcgtcactatatcgtgcagggtacgatgtctccgagtcctacttggagaccacatgacctgcgatataatagggacccccgggaagacctaaggcatcgaatctcatagccaacacaacgaccacagcctacgaagccggagcctacaggagccaagtcgtcgggtgatctagtcgaatcaactcgactacgatctcgtcggtatcatcgagttccattattccctttataatttgtggttctctccatataatcccatatcaactggattagggctattacctattaaggggcctgaaccagtataatcgttgtctcttgtttccttgatgtcgtactacgtagatgctcgtaccagcgtaccccaataccctctatatccggtctacgggtacccgccgtcgacagtggcgcgccaggtaggggaacttggtgctcaaggttgtactactatgacatcaagcttcgtcgacaacggcgtcaacaccggccccatccaaggagtccctacttcaacaatgctggtgtggactcaagtcggcaaaattgtcttcccggtttacaccacggtaccaatctcggctggtccatcaatgaccggaaacgagaacgccgtggctataaccccggacgatcccgtgtcgaaggatcctcccgccgtagcggagaacagaacatcgacgtcatacgagcccgagaaggttcctagtgcggccaaaccttgtccttccgacaagaactgtgagccgacaaggacaactcccgaggtaacaaagccctggtgtcctatccacaaatccaggaagcacaacttgcaagcttgctgggtttttctcaacgtacaagctgaaattcatgcttgcaaggagcgtggaatccagcgtacttctccaactcgtgatgtctattgtcctattcacaagacgaagaatcatgacttctcaagctgcaaggtctttctccgcgccatgaaaacatcgcttcctaaggtccagcagtcaggaatctctcttaaggatgcagacaaggaacaaggagcgacgttgacctcggatcgattcgttggagtaatcgacatcgatccccacgagccatcagtcctacacttgctcgaagactatggctcgtcatcttccagtaaacgacgcgacgtgtttaccatcggtgggactagcacgtctgcgcacgctaacgcagatgcggagaaccaagcggtcacgccggcccaacacctcggcaccgtcaacgcaatactgagagaagctccctatgaccccgtacttaacgatgatctcccatgatggacagaacgactacgggaatcagtagccaatctcagtaacgcgttcgaggaggtcgctaccagagcacaaccagaacatctgacggttggcggtgccgacggcgaaccaccggagcaacggacgtcgcctagacgagctacccctccacctcgcggcaccggcgatctccgcgaccatctgaatggccgccgagaagcacaacgcgcgcgagataacgagaatcgttcccaacattgtgtctcttcacgtcgtcataagaacgaagagcgaggaggccgctcgaacgaagaccaacaccaccataatcgtcacatccaccacgaccgcgacgatcgcgaacagtggacaccggacgatgctggtcgaggacgtcaacatgacggtgattataatggggatcggtgccaggacaacaatggtggacgacgatagaattctcgagaacctgaacgtcgccctcggaatcgcacaccggagccgagtgaaccatcgtcatcatcgtcatcatcttcatcctcgtcatccgatagacatccacggaggacacacgatcgccgacaacccaccgcccctagcgccgggtgtagagctttcaaccgttctctatgtgatgtccggtggcccgagaaattctgacccgaggcaatagagaagtacgatgggagtactgacccaaaagaattcctccaggtctactccacggtactatacgctgctggagcagacgacaacgcgttagcaaactatttgccaatggcgttgaaaggttttgcgcgttcgtggctgatgcacctcccgccctactcgatttcttcatgggcaaatttgtggcagcaattcgtcgctaacttccaaggaacttacaagcgccatgcgatcgaagacgatttacacgcgttaacacagaatccggggaaatctttgagggactacgttcggctctttaatgagtgcagaaatacgatccctgatattaccgacgcctttgtgattcgcgctttcaaaaccggtgtcagagatcgctacactacccaggagttggcaacaaggcgaatcacaactactcgaaggttgttcgaggtcgtcgattgatgcgctcatgtggacgacgcactgagacgcaagaacgacaagccaaaggcggggggagagaagaagccagccaaggacgcacctgagccaagcaagaagaaaagcggcaagagtaggaaaaggaaagctcaagcggaagtcctcgcgtctgaatacgagcaccctcccaaacacccagacccacaaggcagtgatacgaagagaatatgatgccccatacacaagtcagacagacattctccggaggagtgcctcatcttcaaaaagtcgctagaaaagcaactagctttggagaagggcaaacgagcacgtgtagtcgagaaggccgcagaggcaaccactcaggactcggactcggcgtacccagatttcgatcttcatgtctcgcacatcttcggaggttccacagcgtactcttcaaagcgagaatacaaaaaagtggagcgcgaggtttgttcgacatggcaaggggttacacccaagatgaagtggtctgaacagaagatcgagttctcagatgaggaccaccccaaggctgctgttatcccaggacgatatccgatcgtggtcgaacccactattcggaatatcaaggtagcgcgagtcctcatcgatggcggcagttccatcaactttctcttcgccagcaccttggacgcaatggggattcctcgaagcgagttgacaccaaccgatcaaccttttcatggaatcactccccagtcttcgtccaaaccattgggcaagatcacgcttcctgtgactttcagccaagcgagcaacttccgaacagagcagataacatttgatgttgctgagtttgacacagcatacaatgccatcatcggaagaaccgcactcgcgaagttcatggccgcatctcactacgcgtatcaggtactcaagatgcccgggccgaagggaacaatcactattcaagggaacacaaagctggcggtccaatgcgacaagcggaacctcgacatggtcgagcacacgcccagcccaccggccacagccgagccacccaagaaagtgagcaaaacaactaagacgccgaaaccagatggcgcaatcaaaattgttccactctccagtgccaaccccgacaagacagtcaagatcggggcatcactgaacgagaaataggaactcgcgctcatcaccttcctccgcgacaatgcggacgtattttcttggcaaccgtccgacatgccgggggtccccagggaggtgattgagcacaaaatcatggtgcgacccaacgccaagccagtaaaacaaaaactgcggagatttgcaccagatcggaaacaggccatacgagaagagctcgacaagcttctcaatgctggtttcatcagagagatactccatccagagtggctagccaacctagtcatggtgcggaaggccaacgggaagtggaggatgtgcgtcgacttcaccgacctcaacaaggcgtgccccaaggatcacttcctccctcgaatagaccaactagtggactcaacagctggttgtgagctattaagcttccttgacgcttactctagctaccaccaaatcagcatggtaaaagaggatgaggagaagacagcatttatcatgccgctcggtgtattctgctacgttaaaatgccgtttggactgataaccgcaggaaataccttccagcgtacgatcctaggcacgttcggttagcctaggatcttgatccatggttgctctcatatccgatccccagggtgtggtcagggtaacttctctacgtctacagtcaattactcctctatgctttgctaaccaatccattctcaaaatgacatcaagagtttgtggtatcaaaaccataaggttggagggaaacaccacatccctaaggcgaataggtacgtcaatgcaagctgtgtccacggctatttcacccccaggtgaatgtactaacattggttgccttagtttaactctggttaaattgtgttgttgacttgctttcagagatataaatgaatgcgatgctcctgaatcgaagagaactttaactggagtgaagttgagtgaaaacatacccatcagtacgccttggtcctcctgggcctcttcagctcgaacgtggttcacttgtccgcgtccaaatccggtagcggtcctgttagtctatggagtcctgaatagacctcgtccagcagcaggggtagtagttccgtgaatagtcgttgcattagctccggtgcaaataggtgtcttgtttggatgggggcatttgttggcgaaatgcccgtactctccacagttgaaacagcttcctggccttactgatccagtggcggcctgattcggtgcaggagcgcggttctgaatggtaaccggcctgtggtaaattcctcccagcttggttctccagcatcttcttctcaggctcctttgtatgtgtcccaccagtctccggctggtccttccaattggtttgccacaaagatcactttatcggcctcacgtactcgaacaagagttagcttcttctcaatgatccttaaccaatcttcagcatccataggttcttcagctgtggcaaatgtgggtggcttggtcctcacaaactctccaaagcttgatccaccgcggttgccttggttatttgcaatggcttgcagaagttgggtttgggtgaccataactccggccagggtggttaggtcaggtgtctcagtttcttcattgctggttgacgcccgacgtcggcttgccatctgtgtaggttgatggaataagtatcctaattttctaactagctcttatggttctatcccattaagggggttattttggtgtgaactttgttttgcaagcatggtggaataaactcatttataacacaacaacaatagatatcataaataacatcacagagtttcacaaatggtacataaatcatgatgcaatcgactgcatacatacgcagtccaaataaggttcatgcaaaagatacatcaaactaatcatcaatctactcgtcaatctaggtaagaggggggtgtgtctcgcatgctatccaaaaaccatctgatacgagatcgaagctgcaaggagtctgtcaatctagtcctccagccatccgcaggatcctggggcaggtagagggtggtcgctggcacgcgcaaacctgagtccccacggctcagaagtagtggcctctggatctggcttgggcctcttgcccggaggtcgtgtgctcttgcgagcagtgctgagggtgcgaggacctccaaggaaggtgatgcggggaacaggggtctcatcctctaaaggatcagtgatgtctggctcgatctctggctcggtgtcggtcccctctgtctcggagtcgacctggatcggagtctccaaactggaacccaactgcggagaaggtgtagggatcagtggagtgcgcacaatctccggggcaggtggctgtgtcactgtcgggtccactaggtaaggtgctgactcggtagctagcatactagcctcacccagaagagcgtggaacgttggtgggtacggcggggtgaggaagaagtagcggtcacgccctactgctgtggaagtagaagcccctgtggtgctgatcgtggctgctcgaagctgctcctccagctggctgacgtgctcctgactctctcttagctactcctcaagagtatccatcatcccgcggcgatcgttgtactggtcagataactgctggaactggtcgccgtggacctggagctgtgccttcagtgagtctatctcactgccccaggcctggtgctcctcctccaactgaagctgctgcgctgtgaggtcggtcacctcagtctctaactcccctacacgtctctactgatcgtcgatctccaatagggcctcctcgtagaagtcgtccgcagcctcagcccatcgtgacagtcgggtcactatcgggttgtagcagcaaggtgtgtcctgaactgtgcagacggagttgccctcctctcgaaatgggtggtgagcaaactcagtactcgccaactcagctcggtggatagagctaagtcggaggaaggcctcccgggctgcatcctgcatcgcggtctccggcaagtcgcgacggtggcgtgtcggaaagctgtagtctaactctgacgaaactcgtgtgtgaacctcgacccgagcctcctaaacagatccacactgtctcactcggtaaatcggaaatctggggtatcgcagacgcctcatcagccggtgtagctcaatgacgtatccctctgagcggggtacgcccatctcccaggtggcgggtgaatcctgatctgccttctaatctttaagaaaaacccaaagtcagctaagagtaaaacttgttttgtgaagaaaatagttaagagtaagatgaaaatcgttccgagttttgtaaacatagcgtttttatttttgaaagtattactaaatgggaatttctcccttggccaacttagaaaaggggtggagcgccttttggtcttttcctacagtcgtatggctctgataccagctctgtggacccccgtttttataacaggaatcattcgtgtaaacagtaccatttccctggatcaagtagtctggtacacacgagttcatagctgaaataccaaaagtacatacacgagagtctagtgctaattattacatcagaagcccgcaggcattgtcttaaatcatcggaccgagcggtccggaatacatccaaaagcagaaatagataaggcagcggaattcaggcagcggcatgccattgccacaggcaacgaccgtactaacacctactgagcgccatcgtcttcatctccctcctggtagtaggcatagggatcctccgaagcttcatctcccgcttctgattaattttatatttgcaagggtgagtaccaaccgtactcagcaagccaccacagcaacaatgcatatgaaaggggtattccaaaggatggctatggctcttttgcgctaagccagttttgtaattcttttcacaaacctaagacctagcatagactgatcaagttttaataccagtgttcacattaaacaacgacggttctgtccaccatccattgtgatttcaaggatagcttcccgccattgagtcgtcatggttttctgaggatgtccaccttccctcctctcaggaagtggctccagcagcataaaaatcatcatgcaatatcccatcccacacaggttaagaatttagagtctagccaagtgcaatacatgtcccggtgctcaataactgcgagcacggctattcgaatagatttggtttactcacactgcagtggatgtacactttacccgcactccacgactgcccaacacatgagcctcgtcccaacacatgagacgcgtcacggcaaagcttttcgataacctcgcattggcagtacccgctccatgaacttaaatcctcatgcactctaggcgtccatgtttctagcagtgagaggagttctggcgctcccgggaaagagaagtctcacacacatattaaattatggttcaagttaagttctctctctcacacactcatggcagtcctaccaatggcgacaccgatgtagggcacgcctctcggccctacctcaatggctgtcccaccgtagcgcacctgcctcactcaggggtgaaccatctatgcagggatactgcttccgctcggctatctactccgctaggtctatacccatacgagaagtgcggttgtacgagggtcgtttcatgcttaacttcatggctcggtccttaattgaccggggacggtactagccttttccagataccacccaaatcctccgtccgccccagtcgaaaacagttgtgtaattttatttctcctttcacaaatcatgtcatcaacatcatggcaatgtggcgctcatgtctccacatgccgcatctccattaccttcccaaaggtaattgcccaaacatatagcatttgataaatatgagtatgcatgattctagaatagcatttctaagcaattgtcatagttgactagggactcatacgtaaacatggttacaaagatctaagggtaatcaataatcaaggcatggcataatcacaagtaggatgttcatcattgcatgcaattttatttgtaaacaaaacaatttcgcaattgggatcaacatgttcaaggaatagtgatgacttgccttgctcaaagtcttgcgggtcttggccttcgcttggatccgcaactccctcaggctctatagttacgtgcgaaaattgatttgaattcggttagaattcaaataagaatccaaataaatccaaatgacagtcgaatgcgaaagtcgattcctttttattaactttactatccgcgaactacggcaaacccaatttcgatttaaactattttgcgggtataaatattttgttgtcataagtttttaatttaatttacccgagcattatatccatataataggttaggaatttctatcgcgagctaaatatcggacgaaaccctagaaatattatacgatttaatttagtctaagactgaatgattaaatgtaacacacggctaaaatctctagtaattaaatccgaatttctaccgtgaatcgattacttatagggattacccaaaaataatctataataatctataagaattcatctatttgtttagtaattaactacatctaaattattaccgcgaattgatttcttatagaaattgccaagaataatccataatttatattaaattttgcaattctacgactataattaatccataattaaattctaattattttaaattttctaaacttccctaatcttcctctaatttctatttattttttttcttttctttttctctcctcttttctctcttttcttttctttttctctctttttctctcttttctctcctcccggctcctttctttcttttccttctcttcctctcttttcttttcttattcctccctaccggcctctcctttcctctctctctctcggctcttgtccacccgagcagcggcggtggtggacgcgagggggggggaaagacggctcaccagcggcggcggcggcgacgacggcggcagcgcggcggtggcgacgacggtggcgcaaggcgacggcgacacccggcgcggcacacggtgcggcgcggcggcatcgagggcggcggcgcggcggcacggggacggtggcgcgacggcacgaggacggcggcgtggtggagggagagaggggaggaagaggaaaatggagtgggggaaatggaggggggagtatttatagggaagagggggagaaggagaggggaggggcgacggggctcggggcggcgcgcggggctcggcgcgtggtcatgggacggcgacggcgacagcggtggctcgcggcgtgaggcgggacgcgacggcgacggcgacagcacggcagcggcggcacggggcgcaagacgacgcgacgggcggcagcggcgacgtgacagcgggcggcgcggcgcggggcgcaatgacgcgacaacaacggcgacggcgacgcggcagcgacggcgatggcgcgcggcggtacgaggcgcgaggcgcgacggcgacggccgagcggcgcggggcgcggcaggcgacagcggcacggcggcaggcggtgatggcgatggctcggggcgcgaggtgcgcatggcagggaaggggaaggggctagggaacctcgtcgaacacctagagtgcaatgaacagtgtctttttcctatttatcccgattttagtttatttcccatataaatttgattctataatttctaaatcttgcataaatgaagtttactcaatgtttctgttatctcaactaatgaattcaccctagattaatattactcatattttattggtataatttatttgaatttttaattagggttaattcttgttccattgcatttaaatctaattaatacaaatatggccgcgatgatattttatttattcctatccttacataatctttattttaaattataatttatttatttctttaaccaaatctaatttcagggttaattcctaattaattttcccctatttctgatcgatgaattctgaaatcaaaatccaataaaatcgtcgaataaaattggcatgatgcaatttatttaaaaagtttttgaaggcccatatttttagagtttagattttttttttgtcggtcgaattttcagggtgttacaaacctaccccccttaaataaatctcgtcccgagatttcttaccagttttcgaatagatgcgggtactccgtcctcaagaattcttcgctttcccaggtggcttcatcctcagtgtgattactccattgtaccttgtacatacgccacactttgctcctagtcctcttttctgctttacccaatatccggatcgggtgttctggatacgtgagatcattgctaatgtgaatctcttccagcggagcttgttcttctggcactcgtaagcatttctttaattgggacacatggaagactgggtgcacatcagcgatattctctggtagctgtaactgatatgcgacttctcctcttctagccgtgatttgaaagggtcccacatatcttggtgctagttttcccttaatcttaaacctttttgttcccctcatcggagaaacctttaaataaacgtaatctccttccttaaattctaggtttcttcttcgggtgtcggcataactcttttgtcgtgattgtgctacctttaaacggtcacggatcaagcgaaccttttcttcggcctcattgataatgtcaggtccaaataccgcccgttcacctgtcttagaccacatcagcggcgtccggcatcgtcgaccaaacaatgcttcattgggggacatcttcaggcttgcttgaaagctgttgttgtaggagaactcggcgtagggcaaacacctctcccagtctttgctaaaatccaacgcacaagctctcagcatgtcctccaggacctggttggttctctccgtctggccatctgtctgtggatgataagctgtgctaaaagcaagataacttcctagggcttcatgtacttttcccagaaatgcgaggtaaactgtgtgcctcgatcggatataatcctcttaggtataccatgaagacacactatcctggtcatgtacaactcggcgagtttagcactgctatagtttgtcttgacggggatgaatcttgccgtcttggtgagtcgatccacgatcacccaaatggaatcatatcctgttgcggtcttgggcaatccaacaataaaatccatacttatctcatcccatttccactcgggaatcctaaggggttgcagcaagcctgccggtcgctgatgctcagccttcaccttttggcacacgtcacagagtgctacgtattccgccacatctctcttcatgttgggccaccagtatccttccttcagatcttggtacatcttcgtacttccgggcaacctccaagagtaacaagtctaggatgcttgccgaggatgatcaagtgccacactagctataacaatgaagcaatgcacttggattggcttaactcactctctaacacctcactagataaactaagtgcacaagggtgtgagagctcttgcaagggttcaagataatgcaatggagtgccaaaaccttacccttgctgctggggagtgggtatatatacccccaaccaccaaaactagccgttggaaccgaaatccccaactttgtgctctgccagtcagactgccgttgtgaggctggtcagaccggactactttgtaacggctacggctagaaaactagccgttacagggcaatcattgagcccactcaacctggccggtctgaccgcagtgtagtggccggtcagaccgtccacggctcggtctgaccggttgcggctctggcggctctgtatcgccaccaaaaaccagaccagtgcaacagactagtggggccggtcagaccggccttaccacgccggtcagaccggctaacagacccggtcagaccggcctaaggcccacggtcagaccgcaggtcacttttcagctcaaccgaccgttagtaaaacgacgatatctcttgactcgggtctcggaatttggcgttcttggactctatggaaagcttattcaaagggccatccaacccatgaaaaatccatccaagaaacacaacttaagtcaaggataatgggctcacactccaaaggatatccaccggacatacccacaagatgtcactcactcctattggacatgtccacttctctcttggtttaggacttgagaaaactaatcacacttggttagacaagcccaaaaaatgcacctacatgcatatgaactaatatggcacaagatcatccacaagctcgcttcatagaaccctcttgatagtacggcgcctatctagcaaatccgatctacaccaaacaccaagaccgggaaaagactaagaaaacattcttagctacattatacctttgccttgcgccatccatcttagggtcaagcttgagccgagatcaacacttgtgaccatccggttgaaccatgtttatgccgaggtcttgtccatcctttgtcaagactttattctcatcacaagcttgacttcattcttgccaacataacaatgtacttggcttggtgaccactaacccatggtgtcattcattagcctcatcgtagtgggacctattccttttcacacctcaaaggagaacattagtctcaacaaatcggttgtcatccttcacttgatgaccaaccggttgcatatgaaagatatggatatgtttgttgagtattcattaacatcacaagtgtcatatactcgtatgcaagctcaagtgcaaagatccgatataaataataggtgaacaacatggatctagaacatgcacaataaatgtataggatttgctccccctaaatatatgcatacaaataaatatacaagagatacaagtgtatgcataattagagaatgaccaatgggggtttatcttatacatatagagaaggcatatgtagtaatgatgtagaccaacataaaacatataccttcatgatctccatgttctcaatgtaaatgagactaaataagataacattcgagtaaacattagtctcacacttatatatcaataacatggaaatcatatatatgaacctatcaaaaagtaggagataagaagtggtacatatcgttttatctccatgcatttcatccttgtcatgattaaggtccatcacaaaagaatgcatatcttccacatctcattatcaggaaataacctagtagacaacttatgcaaaagagaggttaatcccataaacatcggtttatcatctatcaccaaagtaacaattacacaaattgtttaatccaagatctttcaatcttttctctctttggtgatggataataacccgatataaacaatatagagagatgagatgaaaaatgatttcaaatcaagatagaaatcttataataaacaaaatatagaataagctccccctcaagatgtgcatacatatggatatgaaggaacgcatatgcacataatcaataaagatcaaataggaagctcatactatattttggatccacaagagagaccaagttagaatatgtgaagtttaatacatacctctcatcatttttactttcatatccaaatgagactagtcaaagaaaggctcataaaaatgattagtctcatatagttagatttgtcattaatcaccaaaaccaaattaaggcacttgaacttacatcatgacaccgcactccccggtgagctggtgcagaccagtgtaggtaacctgcagcgagccacggatctccgacaggttgttctcgagctctgacataaagtgctcaagcccctaccgttgccgctcgttgccggctaccagttccctcattttctagaggtcctcacaaacctccgccaagtcgcgcgccagtttgtcggcgcgctcgttcgccgacgacgccgccgctgccctcgcctccacgatctcgcgacttatgccgcgagcaccagcctcgaggatgcaccccatctcgacttggagctcctcccatgtgaggacggcagcaggcgggcctcgaccgggcacaagatcgctggcagggccgctgggcgtcacttcgcggctcctgggcgcgaccacgacatcggtcgaggccactgcaggagatgcgctggagtttcccccagacccatcttgcgccgccctcgcccgcgccgccctacgaaagacgatcatgttggtcatcataacaaaacgccagaatccgatcaagtcaagggcctcaaatttcgtccacttacttctcgccgagtgtcaccagcctatgccgtcgtggaggcgggggagacgcatccaaggcctaagtaaaccgagtacgatatgagggtgacattttccgactacgtaatcgataaccaaaaaggcttaccgatggggtgggcgtcttccggcggttgccgagcacggaggaaaacttcctccctttcctcggaactttgctgccgctggtcgtggcagcagcagcggcaatggccgcgtcggacgcctcctgggcaacgccctccttcaacgaagccgccgcctggtggtccgcgagcggcccaatgatgtcagtcagggagagtgcctgcacaacatgaagtcatgatgcgatctaagagttaaaaggtaaagggtcattgattacactcacgttgattgcggcttcgcgctcagccgcctctttctcgcaaagaggggtgggggcgttgctcgctgtcgtgggaccactgatcatcacctgggaaacacggtgctccacaattgcgctgttcaaacctgtagatcaagaaccaaatttcgataagtcaggaggaatgcgcatgaaaggagagaaacccagaatacaagaaaaatacctcgaggagaaacccgggtcgcgtcctctggcccagagtagtcaaaggctggatgggctcgagcctggagcggctggatccgtctaccaatgaagtccgcagcgacttcataccccgacaatcctcgtactcgtactcgtactcggagatccaaatactagagagatggggtcaaggcgggtttggcggtccaagacggaatcttgtctggttgctcctcaggaacaatgaagactggatccgaatcttctatctgaagatagaaccacctctgtggagattatggataccccatacctacacggcatgtatagtccgactgggtatggggtgtcatgtatagatagaatatttttaaaaggactcgggttaaattctaaacttgtatgtcaagaaaatacccgagatcctagtcggttacgattgtattttatctataactgcctattccgttaggaatatgggctgtgctttgtaatacggatcccttcccctatataaggagaggtccggatgcctttagggacacaattttcacccagatcatacgatcaataatacactcggtggatcaatccccggataggagtagggtattacttcttgattaagaaggcctgaacctgtataaaattccttgtctctaaacccatccacttttctagcttgatagccacccccttttagtattgccgaaatcttgtttcgacaacctcgcccgccatttgctacgagaagaggggcactggaaagggatgtatcgcgacttcaggccatcccgaagtcaaaaaccaacacacccggatacctttttagattccatccagcgcaactcgtagtaaaaacggaagaggtcaagaaacggctctaccccaatgtaggcctcacaaagatgataaaaaatgctaaggaaggctatggagttggggttcagatggagcagaaaaagaccgtagaagttcaagatgagaaggaaaactcagaaggcggaggaagaaaaccacagagaatataatcctcaaccgcaaccatgcggcccaggacgggttcaggttcagtacctcccggttccctctccatggtcccgcgaccgggaagagcgccctcctcctgcaacttcttcaaagacgcaccggtggaagtggacttgtcgaggtccatcgccgttggagatcgcgggagaagaaaccgaggcgagcgaattagggtttgcgtggaagcgtagaagacgaagagcgttcagaggctagaaagtttttgcaacaactggactccaaaatggattcccaaaactcctttaaataggcacactaccaacggtgcgaattgcaaggaaaggagagagatggccgccggaaatttctgggtccgttgcgcgaggcggtttttggacttcaatttaaattcactcataaccatttccatcaagtaattcaaatgcttgcatgcacatatttagggggagcatgtcctatgttttgtatttttgagactaacttcttgttaagtgtattttatgtttagtctcatgggaagtgaaacattctcaaaagtatgctattcacaagtggtaattcaattaccttttcatcgtatattttatctagctacctttcataatatagattaaattcccttgcttgatttaaatgtcaaataatgcacataaatttgccttccaccatatgtgtgcattacttttgggagaatttagtctatattatgaggtttcatgaataagtgatccaattttcctccacatcaaaaggatcattatatgtgaaactcgtgtgctttttatgctttctcttttctattgattcaaatagagaaaagaggtaatgatagatcaaggggagattgatttatgacaaccgaaggaatgggtgaagaaggatgagattggttaagcaccatcatcttgaaatgtgaggtttatgaaagtgtgctttacaattctagtccttaaatttatttcttttggtgatatttgcctcctgacccaaaatatagtgtaaactcctccccaattctcatttgagtaaagtgcatatgtatgcattaaatttatccttatatgcacaccttgagggggagtttattctataccttggaagactaatggtttaaattgagtttatacttttagtcttatgtcggaagtggacgactcccaaggtagacttcattattgcttctatggattttctttgcaaccttaatttcataatataggatggattcttttgttccttcatttcttttgtgaaagtgcataaagatttcttttcactcttttgtatgcacatatttagaaggagttcatcctatgttgtgatgctacataagtcttgatatgtctcttcatcgtcactatttattgggtcttggcttatgagacttttctttcgggcatacatgacttgtctatagcattatatgcctgacatactttttgccctccttttagtgagttttgggagaagtatgtgttaaagagaaaatattttttgaatcatgcttttgtaccttgctccaaattaagtgagtttatctaatcaatgtatttgctatatgtgcatatgggttcttaccaattgtgactacaaactaggcctatctcttttgattggtattattctatcaattggtgtggctcatatgcacaagaccaaaaagagcttgctttggattggtgtctctttggatcccaactctttctattggaattttgatgagttcaattgctttatttggtgttggtgcacatgattttcttgtatatcttcttgtgtgtacctcgaggctatttgtgctttgctattttgaaactaacgcttttgatagagtttcatcttgttgtagcctctttggaacaccaaaggtatgttaaacctttttcccttcaagtgtataggacttgtgtagttcttatatacttgatatgatttctttttctttatgctcccacccactcatttaatcttttggtgtttgatgccaaagggggagaagtataaagagaaagagatataaaggggaaagtgcatactcatttcatatgttgatgaaactaaccctctagtatatgtttcatgctcaagttaacatatactagagtattctctttaaattcctattcttgtgatagtgttgtcatcaatcaccaaaaagggggagattgaaagatctatgcactagagttgcccttgtaaggggaggttggaagatctatgatcctaagagtgtggtgattgttttgatgattaatgacaacccattgttggaactaactatttccatgagttggtgagattaggttaagttccggcatcaagttaaaagattgaagctagaagaagacgttataccttgatgaggagcaagtgaagacattgatgatgcggggtatgaagtggctatttatggcaaaacggtgaagggcaagtaaggctcggctacaatggaccatgcggagggtgaagggcaagcaagaggcttggcaccgatggaccgaatccggtggtgaagggcgagtgaaggctttgtcataatggtcatgatggaccgtgggaggccatttgaagctatgagtaattcgtatcaattattagaagaccgcaagatggaatgccgaagatcaagaggatgtggttctccaatgaacatcaagtcaaaagccaaagtgggtattgatcaaggcaaaggtataattgatttgggactaatatgcttaatgagtgtaggtgagaatagtccgaatagtgaaatggcgttgatgttgacaaccctcaaggtgaagcaagaagataacattcttagtggtgtattagtcccaggttgcttaggagtgggctaggatgcttggagaccccccaaaacaaagcggcgagaaaactcggagccgagttagactagtttactttttcgctttgagtttaggaaaaaccatactattaagaggggttccaagtgtggttctgagataacacaagtgctcttagtggtgtccaagtgttgaaatatttttaggagctgtttttgaaaatggctctactcgggacagagagtcccactcggaggttctgtctggaacttcctggcgccgaggtgaggttgaaaattttcctaagtgctggccggaagttcctggcacttttaccccgaacctcctggtaggtttccagttcaaacttgtgagtaatggctagatgacgtcacctagccgttatatatatggatttcgtccccaggtcaccctttggccattccactttagttcttgtgttccctagcttgttctatcctctcccaatgtgattttgcttcctccacctaaatcttgtgtatttcttgagtgagagagtgattttgagggtggtggtgaggattggagaaggttttgaaggctaggttgacttgagcacttggggtatctcgttgggctgtcatttggagcttgttactcttggagggtgacctcctagacggttaggtgtcgcccgcgagtttctaacaaggttgtggattgacccgggcaagtttgtgagggcgttattccacctccaaaaggaaacggaatactcggtgagtgtaatcctaggtgaggtttaggaggtcgtcttggtagagcaagccttacttgtggtgttcttttggtgttcaagttggggatcttagtggtcacttgaaaccaaagagaagtacctaggggtgttggcttgaagaccggagacctcttcctaggccttttcttggtgaggcaagggattaatcaagacccagctctttagagctcctcaacggagacgtaggattctcggtggagaatccgaacttcgggaaacaaatcgtttgtctcctctcactctctttatctttgtgattgtgatgcttatctccttatttgcctagttgtgctatcatgtctcccattgtatgatcacttgtgctatcttgtgtattttcatgtgtattactcttgtttgagacatgttgtacctctctatggtttaggcttccttgtgatttaatttacttgttgtgaggtgcttgaaatagcaattaacaactgcccggaagttcctaggaagaaccccggaagttccgggcagctttctctgcttgtgagaaaaagctgccaggaagttccggaccttttgccaggaagttccgggccctgattttaaccgttgtgttttgaagtaaattttaggaacgcctattcacaccccccccctctaggcgacatcaaggccctttcattgtcgaccactccttgtctctacggtcctcacaccaagatcgaccagtcgagaacgacagcaactccgacatcagaagtcgcgatcggttacatgagttcatttaagctgaagtcgggggctactgtcagggttacggataaggtataccctctacccttggatgtacgctatacggcaatatggtacatctgcgcgtgtacggacattctctctatacgctaaggaaatctatcacgaagtccaccaatggaaaggttcctacccatataggactgggtcgtcactatatcgtgcagggtccgatgtctccgagtcctacttggagaccacctgacctgcgatataaaagggaccccccaggaagacctaaggcatcgaatctcatagccaacacaacgaccacagcctacgaagccggagcctacaggagccaagtcgatgggtgatctagtcgaatcaactcgactacgatctcgtcggtatcatctagttccattattccctttgtaatttgtggttctctccatataatcccatatcaactggattagggctattacctattaaggggcctgaaccagtataatcgttgtctcttgtttccttgatgtcgtactacgtagatcctcgtaccagcgtaccccaataccctctatatccggtctacgggtacctaccgtcgacaatattataaaagtaacttaaaacaaaacagaagtaattttgtcacgacattataagtaaatcatttgtaggaataaaaatatgattttatctagaaattaaatttaatcagcagagatcaacacacataagtttaacaatttttaaaagtaacttcaatgttaattggaagtaacttttgcatggttcaaaagtaactgtctataaatctatttaatcatcgatagtttctttccttacatttttgtttttcatgtagaatgagaaaagaagatactattgtttttttcaagttgaaaggagatacaaaatagagtacaaactagttaccactagctatgtagtcacttccaattaaaaaagacattcattaaagttacttagtttttgttataagttacttctataatatatgtaaattagttttaggcttcattgaatttacttttacatatctaagaagtaatttagatatattataaaagtaatttataatttttcatcagaatatagtcatgtgagatcttgttataaagatataattgttacaaacacaacggtgcaatcggttcgtagatcggatgagtagtttaagagaaaattatatttgaagtataggtagataatgtctcttatagatggagtggaactagctaccactagctgtgtagtcacgtcctttctctttctatgtggcatattaccatattttatgggtccatattaagctaatatggtattttttggataatgccaaacgtcatggactaaattacgatccctttagtgtacagtagagcttatatgactgatgacaacaagaacatgtagactctcaaagcatgacttggcagagagaatgaagggatgagggactgggagcgggcaactatataatcgcccgactacacacgcactccaagaatgacacacccacgctaccaggcgcgagagtgataggtcatctgcagtacaacagagttcctgtggaatagtgatctaagtctgctacagtaactatcgcatggtactgtagcaagagtcctttagcaacagtggtcgaattttactctcgagtctcccagaggaacggcatattcgatgccacgtccatcacagacgaagccccatgagtaggggtgaaaacggtacgtaaactttccagattccagatctattttcaaaaacggaatctgtcggtcggaattttttcggaaacagaaacgaattcgaaaatattttctccgaaacggaatcgaaaattataagggcagtttctgtcggaactcggaatcggtcggaaactttccggaaattttctcggaatttccggaaattttgtgactgagatagcctggattcctttttttaaaccacttaatagtgaataccatggtgtcaggccgaaaatatcattgttgtgaaaatatcattgttgtgaacagtggtttccgtccgtttccgtaccgttttcacccctacaccacggtcagcaacgtctcctgcatttgccccgacgtccgtcagtccgacgccctcgtccatccaagcctccgaggctctgacagcgtccgccaggtcgccacctcgaccacccaggcctccaccctgggctgcatccccctatgaccaccatcatcggctcgtcgcccgttggatccgttgtggctgccgccgccgtcacccgctgcatctgccatggccaccgccaccgtccgtgttccccgcggctagcgctcctgccatcgttcgcgtcgctgcactcaccctcgccccgtcccgtgtggcagccactcttgcctgttgccggtagccgtaaggtcgcgccctctccccctccatccgctgcggccgccgccctcgccctcgctctcttcccgtgtggccactgctcttgcccgtcgcccgtagccgcaaggctgtgaccctctccccctttatccgtcgcggctgccgccgccctccatgcgtcccccgcgaccgtcgccctcaccctcgcaatcgccatggccaccgctgacaccacccccactctccccgctctggcgtgctcctaggtcccgtcttcactggccgcttgagagttgccttcatcgtcagagtaaaggaaaggaaaggaggaagaaaaagaagagatggaagaagagggtgtggctaatgggcgatcgatccccatgccccctgtacacacctctcctctcctccccttcttctcttcctactatactataaattttaaaaaaataaaaaaataaagttagaaaaaattatgtatagaaatactatatataaaaaatatttgaatttaaatttaaatttgaaacgggtatgtaaacttttgacttataaactttgggtttataaactaatatttgaattcaaattcaaatttgaatcgtgtatataaacttttgacttataaactttgggtctataaactttagatgtataaattttatatgtataaattttatatgtatagaaatactatatgtaaaaaatatttaaattcaaattcaaatttgaatcggatataattcaaattgaaatttgaatcgggtatgtaaacttttgacttataaactttgggtctataaatttaggtgtataaactttagatgtatagaaatactatatataaaaaatatttaaattcaaattcaaatttgaatcggatataattcaaattcaaatttgaatcggatatataaacttttgacttataaactttgggtgtataaactttagatgtatagaaatactatatataaaaaatatttgaattcaaattcaaatttgaatcggatatataaacttttgatttataaactttggatttgtaaactgtatatgtgtaaacttgaggtgtataaactttaggttcataaatttactaaaatagaaaagtaatgtggtgccaaaaaagaaaaccacgtggaggagaggggggaaaccgatcgctcctggcgatcaatcgccaactaggagtttcgggaagaagatgatgggccctacaaaaaataatagaatattggtattagagtaaacaagatatttctattgtatgcatgggctctattatttactataggtgacatggctacctattgcagccagtactgagttgtgttattgaacttgcttttagagcaagtttaatagtatagctatctactagctacaaatcatctatagccaatgtaatagccaaatcatataatagttgcttactatactattaatacctagtcccacctgtcaaacacacattacatcttggagtccgtgctgcaactagctacagatctgtagtccgttgctcttatctctcttcttttatctctttaaaatacgtttatagctggtttatagcttgttacgtacactagtaaccgtgcacgtgcaatgcacattccccacattatgtaacattaaacatataaacacacttaaactttgacgtgttttccccaatacatgacacaaaaaatgtagtttgagaattatatctattgtagtgtaatatagcacaacttaataactcccttttaaacacacggtaaaaaaatttggaaagcagccagtgaggataaaatcatccagcagccgtcaactggaagtatttaagccattaaaaaccctttggcagttatcagaaaatggggaacaattatccctaatcaagtaacctgtggcacctattagaaatgtttcagttatcaacccgataattcattttgttgaggcattaaactaaaggttgataaacggtgcatagctatatatcagtatattattcttcctctgtcctccctctgagtgttaagtctagccattcatcggtggagtacatatcaaacatgcagaaaatatacagaaggtaaaaagtatccaataattgattacatatttgtgctgctctatgataaaaagaagagatttaccttcccctaattctgattactaataattaccaagccattacatcgtacagtacacattcacttgacacttaaaactcacaaaatagtagactacctatcagttaactgaatggataaaacacttttaacagtacataacctacctcaaatggcattgtagatagttacaaatctctcttcctcttctgttgttccaaatctttcaattgcaattaaaagttgtagaggaatgggcaaggtacaggaggtgtttgtcagtgagccgaggccaagcagagagaggagaacaacaaaatttgcatcaataggacatgagctaactgacaacatatatgagtgaatgttaccaatctgcaaaacaaaacttttagaacaatatgtgaacttatattgaacattatttaagttttattgtgagcaaatgaaagcataatgtataacgttaggattatacctcaccattaagattcattctttctgatatggggaggaagactacagctgctgcactgaatcttgaatcatgtacaaaggtaaatcagattgaaaattgcatttataattcttttaaattcttcatttagagtgcaaatgaaataataccgtgagatattgaggatagttctcaaaaagatactggggatatatttgttgccaaaccgtcaggacatacaacattaaaaacatatgatttctacatcggcaaaaatatgcaacacaagcaatcaaatttgggaagcaaagagttgcccgggtggatgtgcagatcatagtaagacaatacattcactggaagctgcatagcaccttgagatcaggtctgtgttagcaaaccgattactcctgcagttcaagaactgtgaacaccaccaaacacggccgcatcaacaactgtcacctgctgcccttcttggaaaaacaaatatatgaagaacatgattaaatgacacatcaaaatatgatagcatgaatgcaaagcaattcaatgacctgaatcatctcatcttcatgctgatgtatgtgtgttctggacttctggtagaaagctggagcatccgaaacataaaactcaattaaatctctaatgtgcggcgtggttgcggcagagggctcagcgtgctcacagcgtcaacgacggcagatgtgggctcgacatggttgtggaggagagcacagcgtggccgtgggtgcgggtgtggggtgaatgagcgattcttgcggctgcggcggatggggaagaccacggttccggtggtggctggggacgactcggctccggcggcgactcgggacgacgtcaactccggccacggctggccgcggcggatgggaagaccacgtctccggcggtggctggggaagacctcggatccggcgagggcagcggtggagtgcgccgcggcggcggcggaaggggacgacctcggctccggcggcggctggagaagaagtcagctccggcgggggtagcggtggattgaggcggcggcggcagtacatgacgggaggagtgagccgcgcgtggagagggtgaggcatagacgcgtagtcttcgcgacgtcttcgcgcgaggtgaggctaaaatcgtgcggtcgagatgggtggacggtacagattagagatctgcggatggacggaccagattacaccggatttgcggatggacggtagagatcgatccgaatgattacaccaataggattggagggaggcgacttatctttttatattaatatagatatagatatagatatagatactcttacagtcttacgtaccatagtaatatttttcgaaccctttccataaagaaaaaaaatggaaaccggaaaagaaaacaaggaaccagtacactagcttacatgcttccattgattccccttctatgcattccgtccctcccgattctccaaacccactcacacacccaagaagatggaaggtcagggaacgcaccctgccatgcccgccgccgccgtctcggtggtgctcgacgacgacgacctcctccgcgagatcatcctgcgcctcgccttccccaccgacctcgtccgcgccgccgccgtctgcaggcgctggctccgcgtcgcctccgccccggccttcctccgccgctaccgcgccctccacccgccccgcgtcctcggcctcttcgccaagcacgccggggctcgctgttcgagcctctcccccatccccgcgggctcgccgccgccgcgcgccgcgccgcgaagggcgccatgctcggctccatcggcggcggcgagccgctgcccgtgtacgactgccgcaacggccgcgtcctgatggacctctccgacccgttcgaccgcggcgacggcacgctcgcggtggtcagcccgctgctgcacgcgtcgcggtcgctcgccgtcctcccgccggtcccgctcgccgcgcgcccgccgcccgtatccgccatgggcgacgacgacacgctgctcggccgggccaccgacgtctgcatcctcctccccgaggacggctgcgacggccagtcctacaccgtggtgacgctggtgcgcagcaagcgcgtggactggcgcgtgtggtgggagttcttcgccaaggtgtccgtcctgcgcgcgggcgcctgggacgacgacgtccgcgccacggcgccggtcgagctcccggcgcggtgccgcggcgacacgacctggaaccgtgccctgcttgtccaaggcaagctatacgtcctgggcatgcagtcccacgccattcttgtgctcgacctggcatccatggccacctccttcatcaacctccccgacggagtgcgccacgaggaggacggagacctcgacctgttccggtcaaacgacgccggcgtcaacctcatccatgtcaatgggtttcaagctcgtctctggcgtcgcggtggcgacgacgatgacggcgacggcatgacagcgggcaattgggtgttggtggacgacattggtgttcgtcgagggttcgatcacctcgcgaaggttggcggggagatggacattggtggtccggttggggttatcaaggtcggcgacgactgcgagttcatgttcttgtgcgttgatggcgatgtgctgtacatggatatcaggacgaggatggtgaagaagattttcaaggcgtcaccgaagagaggaggtgttctgccagtgatccatccactgaccatggtttggcctccaatcttcccagtgctggagtagatcaaggatggaggccatttcagtgatccttgaagaggaggtttggtttttggtgctttgtgtcttaagttcttgtctactgctggcttgctgctggattgatttatcatgtgtgtttgtttcttccattttgtggtaatggacttaaaaatggtatggtcgatgaattaatggattatgaatatatgggtatcctttactaaaatcaatatctgcttgtatatttgatttaactctgaaacaaacaagtaaattattatagcagattattataatctataagctagattattataatctaataagctgctctaggtgagcttttttcaaattattgagtggctaaagacccactactcctacataattgagaaaaattacccacctatgccatcaaccgaacagatagctgagggcattatagactttagcttttcaaacccaataatccatacctccaataatccaaacaaataaacaactcacagcttattctatgtcagcttattataatccagtttatagtaatctggcttaataatctagattataataatcataagctgaaacaaacaggaccttagttacttctatcgtaagcagagcctagttggcatgataactctggtgatgcattgatcttggagatttgttactgtaaccatgaactgcaagaaaggaagatatattttctttgaagcaaacaacccgttgatggaaattttaaccatgttgatggcttatgctccatatatccttccgatcgagcagaacgataaatatcttacgattagtgtacgatacaatgtttctatggcccaatcaagtatcatgcatgactggatcgtatcaaaatcgtaacaagtttgtcgtacgtacagcaatttcccgagcggaactacctcagcagccaggaactagagagccccaggcatcagtcgtttagtaattttgatgttcctattctcatgagttgccttgccgaatcaaaatgaaaaccgaaggattataggttctggatgttccatgctcaaaacaaaacaattgttgccatgttagaatctgaagcattatcaattcagcagtttcttttcgtagctgtgacttaccactttcaattatatgcatgagctgcttcaactatgacctgaaacccaaattcaactcaattttaagttggaacaaaactagataaaacatgctgggtaggcccacctggtgctagtgtctatcgagccatagctagacttatgcttggtgggtacaagtccaaattttccaacaacatcacaattgtttatatgatctgccatatccctgtttttcatttggatatgttgctaagccgagcaaatattccttttttttaaaaaagaaagtgttagaactcaagctatgacagagttgctctgaaatccgaaaattcctagttcagaacaagcagcacatggtacaacacacaaggatatgatttcttctttgttcctgtttcgtatgcacaaaatcagatattgagattcaatataaatgctacataatgttgtacctcctccatttcataatgtaagactttctagcattgtccacatacatatacatattaatgaacctaaacacatatatttgtatagattcattaacatctatatgaatgtagataatgctagaaagtcttacattatgaaatggagggagtattaagtacgaacagaataaagtctgatactacaaaaagctcacaacataattcaatcctaaattgtcaatgacagttattcacacattccaggtttccagtttttggactaaaaactcagaagcagtactttgcaaataatctccaaaacaggctatcaaaattaccagctcaaaattcctctgtagcatacctggaaaaaaggtgaaatttaaacctgaaatattgcttgaattcaatttgttaagcagaagaatatttttgaagtagatcaggttaactcatacttaaatcttattttaaagcataacaaaggaacatcacataagatgcctgactctcctaaaagaccagtaacaattagattgttacagcaagataactacatgctgaattgagaatcggttagacatcgcataaagcactagagaaaaatcctctgggatcattcatactgaattactgatcatcgtcatcgtcatagttcaaagccgggaaagtgggaggccatatcatcatgaagggaaagatttcaaaaccaatatcttcctttggagccatctcgaaaaccttgttcgctgtcctgctcgcaatatgtatgtggaagatcacgcggtctatcgtcaagaacagctcggcattatcctcgactctacgaagtgaaacaagagcatccccaagtgaaggatcccccgactcccaatcgggcctcgcaacttgaccaaacgattgatgcagagacatggtatcaaccatctcccaatcaccaccattcccaccgccgtctgtcgcacgatgccaaacatgaatctgaaaccccttcagatgagcaagatataatccggaatcgccgtcccgcaacaactcaaggttccccatatgctccagctgctccacaccatccgggagcttgatcaagaacaagctcatcgacgccagattcaacccaagaacatgctccctgcccagcatgtagaggctcccatggaagagcaatccacggttcatcttcttgtttggccagtagtgattcggcagctcgattgaatcggaggtgcggatctggtcgtctgattcacctctcaccaacactgctctcgcgaacaatccacggcctcttcgtatcagaaccaccagcgtgtaggagagatcgtcgccgccgtcgtcctcctcctcctccgggagcagcatccagcccgggcgcagcacacgggcatcgttgggtacctgatggagctgcgagtgcaggttcgggggcagatcgggcggcttccgcgcggggggcagcagcggggagacgacgccgaagcgtagctcgtcgggcgggggcgggaactccgccctgaggaggcggccgttgcggcagtcgaagaccacggcggagacgtcggcgccgccgagcgcgaacccgccgaggcggcggagcacgggggcgagctccgggggctggggaagcggcacgaacgccggctgctcgtcccggcgcgcggtgtggtagaagccgaggaggcggggcgggttgcgggcgcggaagcggcggaggaaggacgagtcggaggcgaggccgagccagcgggaggagacgagggcggcgcggacgagcgtggtggggaaggcgaggcggaggaggatctcgcggaggaggtcgtcgtcggcgagcaccgacgaggccgcagaagccgccggtggcggagaggagggacgcgtcgcctcgtcttccatttgcatgcgatcgaggaggtattggagtaaggagctcaggttgagctaagctaagctggtttaacaatatttttctacttaatgtcatttctacaacttcattactctatccatatcaaatataacaatttttaaccttcaaaatttatatattaatttttccacgaacatttttttccaaccaataatactccaacattcaagctcatcacttctaccatttaattctacatatattttttaataactatgtccaactctaaatatataaatctatttatccttaataaaggagtaactaaaaaaaccacatatattaatcagagaaaaggaaacatatcttatatacaaatactaactttaattcaggttttttttttcaatagttgggctgaattttggttaggaggcgcccacgctctcctgctgtaaaccacacacgcgtaggattatttggacaacacgccatgcattattcttttgtctcttttaatatcgagttaaacctttgctataaaaaggtttcaaacatctagctttaacatcggaacaaaaaaatctagatgtacatatactactcgtcctggagaaaaaaagaggcaagtgtcaagttgtcgaaacaaaatgtcatcttgttctgaacagggtatctaacattaagtcattaagtcattaggaacaccggtctaagggcctgtttagatccatgctaaaatttttcaccatgtcacatcgaatatttagacacatatatggagtattaaatataaaaaaaataactaattacacagattgcgtgtaaattgcgagacgaatcttttaagcctaattgctccatgatttgacaatgtggtgctatattaaacatttgctaataacagattaattaggcttaattaataaattcgtcttgcagtttacagacggaatatgtaatttgttttgttattagtctacgtttaatacttcaaatatgtgtccgtatatccgatgtggcacgccaaaactttacactcatggatctaagggggtgtttgggagagagtggactaaagtttagtccccaaacacccccccccccctaagagcaggtacaatagcaggctataagctagctataaatatattttaaagagataaaataggagagagaagagcaacgggctacagatctataaccagctgcagcacggactttaaaacgtaatgtgtgtatgataggtgggaccaggaattaatagtataataagcactattgtatgaattgactattaaattggctatagatgaattggagcttgtagttggctatcctattaaacttgctctaaacaccccctaagcacaatgaatatgcagtcagcaaaatgggaagtacgaggagaaagctaccagttcattaaaaacgcgaacattatgctgtaggatttttagtattatacaactaacattataaaactaaccatggtgagccacaatttcatttggaagatttgaaacatacaaacagctttatgaaattaaatcaaatagtagtagtactttttcaacactattcgccttatccttacaggtttaaattaacctatacaaaagagaaccgcgtattcagattaagcaagacgagatgggagatatctcccagtccaattatgttaacaacagtcacaagtaattataatccctcccctagcaagctaggattgagattctcagcagtcactgtaccgtgcatttgtcactgacatatgggcctgatgatctatgggcccacatgtcactgataaaggcgcggtgcagtcgactgcagaggatcctgatccagcagtgtcgatcctgatccagcaagctgacactgcctggttttgctcccggcgccgtattgatcaaaagtcagatgataattacaggcaataaccactaccttttgacaattgcaaagctacatgaggcatgtacagattctgcacaagatcagcaggtcaaatgaaatgcctctcctgctgtaagcctgtaaagtacacatatgtagtattatttcaaaaacgtgctatacatttagtccctttaaatctatctcttttctttgtcagaaatctctttaaacatcgattgaacatgtgcaatcaacatgctaaaactttgctacaaaatagtttcttacttcttagcttaaagccattggttctgaacatgataccaaacattcagaattgcctaaacaacaaaggttacagagttattgcacaaggaatatgcagacagcaacaccgggaattatgaggaaggtaccagttcatcgaaaacgtggaaattatgctataaaattcttgagaatttactacatgttgggcgccgtgtgctaaaccacccaagtacagtcagtcgatcaggttaacacaaagagagcagaatagcagacaaagatagcatcaggtaatatatattcttgatgcatagtacattaatcttcgacctcatcttaaaagacagagatacataacataagcagattctagcagtgagagatctacaagacaaattcaggaccatacttgcaaggcaccagacaaatgcgccttcgaggatcactgatcttgatcatgatcattcctaagttgtgggaaggtgggaggccagagcatcatgaatggaaatatgtcaaaatatctataagcctctggtgacatctcaaacactttgtttaccgtcctgttcatgatatgtatgtggaagatcacacggtctacccgcaagaacacctcagcattgtcctccaccctatggagcgcaaccagagcatcccctgattcccaattgggctctgcaaactgaccaaacgattcgcccaagcagatgttatcaaccagctcccagttgccaccaccgatgtcggaatcggaggcgcggaaccaaacatgaatctgaaaccccttcagatggatgagatataagccggaatcgcctgcgcgtagcagctcaatgtttcccatccggtgtagctgctgcacaccatctggcaatctgaacaagaatagcctcatggatgccaaattcaacccaagaacatgccccttccctcccaacagatagagattgccattgacaagcacatcacgccttatgctcctttcccagctttcctgaatctctatagttgccgattcacggacactgttcagatccgaaatttcagcccttacagaaactgccttggccaacatctcctgatctttgcgtagaaattccacgaaagtgtaggacggatcgtcgctgccgacatctgggaagaggagcatacacgaggcatgcagaatctgccccggctggcgagggagttcgtagaccagcgggagagccggtgggtggcgggcggggtgcatcgggctgatgatgctgacccgtggcccatcgggagggaactccgcggcgaggacgcggccgttgcggcagctcaggatgacgggcgcgtcggggccggagccggaggagccgggcgccaggcggaggcgggcgccgcggagcgcggcggcgagctccggcggctggggcagcggcacgaacgccgggacctcgtcctggaagcgcgccctggccgtgtggtagaagccgaggaggcgcggcgggtggcgcgcgcggaagcggcggaggaaggccgggtcggaggcgaggcggagccagcgggtggagacgagggcggcgcggacgagggtggtggggaggccgaggcggagcaggatctcgcggaggaggtcgtcgttggcgagcaccgacgagatcgccgcggccgcggctggctccggtggctgcgtccccttgtcttccatggcgttcccgcgaagcgcagctgagagggagaaggggaagcggtcgtctggtccagcttgtgacgagtcaatttccacgcggatttttgacttttggctgactttattactccttgatggaagtattaactaattataaattttgaaaaaatggatttatttgatattttttagaaaaaagcttttccatttttaaaaaaaactgcttagcagtttagaaaacatgtccttttttcctaattaaaatagtctcggattgtaggtcggagttgataacaagaaacctatatatcgaattgtaggtcggagttgaagtttagaactcggccttttttttcatgccaagtggttttagttgtgttctaaacattttgatatgcaaaccatctgtttaaaaatcaaaatgttttaggggctatcctcatttaaatgttgaaatagtcatatcacccatcttatgttgtttggagaatgagatgggttttgcacctactgttgtgtactctctctgttttatattattacaaatcacatgacatttttcctaattaacgaagtctctctttggtccatatattagatgaatacccttgatacaaccgaattttcgctgggttgtttgtaagtaagctaggtaaactatattaaatatttgattgagtttataaaaaaacatttagcaacatctactacaacaaattattttattaaattcaatatttatatattttaataattgcataggtaactaatcaatgtttagtcattgcagtgcttgtcacggtctcacagaccaaagtacatgcgcatttgatatgctagcttcgagggtgtgtttagtttcacgttaaaattgaaagtttgactaaaattgaaagtttaaagaaaaaagttgaaagtttatttgtagaaaagtcttgatgcgatgaaaaaattaaaaatttgaagaaaaagttacgccgcaagagtctatcgatgggctgtcacttgacccactcgaattctcatcaccaaactgcacaagagctcacagtgagccagcccccacattcattcaaatcgctcggcaccgacaccgacaccttacagtgaaaacgtaacaaacaccgctagaagcctagaacgatgcgatgtatgtaaccgcaaaattcgccgcggtgaaaccgaaattccaaattctgaatgcaaatcaaatcgctccatcccatttcgaatctactacaacaaatcaatataatcccaagtacgtacgtgcgtgcacatgccaacgcaacaggtatatatatatatgcgcatgcagcatatggttgagctagctacagcgagaggccggagaggaaggagacgccggtggccggcagccacgacgcgccggagatgaagcgcgccaccgtgaaccgctccgcctcggcgctgtcgttgatgacgcggtggcccggccacgccacgcgcccggcgaccccggccccggggccgtagttcatgtactccccgtagtagagcgtgtcgagcgcgaacgtcgcgttccacgccagccacccctccggcggcacgtgcccgccgatgtacgacatcatcaccaccaccctcgagtacagcttccacggcctccccaggtacgtcggcgccaatggcgccgccacggccggcgccgtcgacggcggcggcggcgaggggacgacgcggcaggcgtggatgacgaggccggtggattggccgggatcgcggcggttctgggcggtgacggtgttcttctggccggggagaggggagcgggaccagaggttgcagcgctggaggacggcggcggcgttgccgaagacgaagtcgacggtgccgtagacgtcgcagtcgcggtagaagtggcggttggagtgggcgtagagggtgtcctggtagccgatgatgctgcaccggtagacggcggcgcggtcggcgctcacgcgcagcgccaccgcctggtgcctctccggccccgcccagttctccaccgtcatgtccctcatcatgaacccgctccccgacgccgctgccacaaatttcacacaaattaattaagctgctttcttatactagtacgagattactaatttgcaacaaattcttgtcaaatttcagcagtgctcgcgacgtgccatgtcgcgccataccgctgcctgcctgcaggctatccgatttctggttcagttaagtgattaagtcccccacccactacactacgccatgttaccgcaatgacgcaaacacagcaagaatgcaggtcgagtagtccatttctaccgtttcttttcaggaaatttaccagcttttatacccagtcatctacagcagctattagtacgtgcctaatactacgagctaatcctactcgaagtggtcttcattgcggaacagtagaagcgttaggagattgcagaagtaacagcaggaataacgatcgatcaattgcccagcaaaaaaatatataaaagaaagaatccaccaatttaatagaactaatgaccgcaaaataaattggatggttccatcatcagacattcacaacaggctggagtagatcattattgtgattagtgaagtttcttctgttgttggcatagtgttgtagtatttaacttcggtagcaatgaattaattgtgttttcctgtaagctcattgcaacccgtcactgctcatatcactaaaataattgcaatttaataacttgcctctagctagtttttactactaccttcttgcgttgagcgcaaaagtaaaattagtttatttagacaaactaggaaatcgtccctatttgtaacacttaatttcttgtgcaaaatcagcataggtctatctatggtgaagacaggggatgcaatgtcagttgaaaagtaaaaagtgaaaaaaatatacttttataaaatataattgtttttaattattactccctccattctaaaatataaggcacaaccactcttaatccaaagaccaagaaatagttattatcatcttgtagtttgaatcatcctaataaatataatgcatgcatctaataggattagataagatgagagtacagaatttaaaaagtaataatttaatggagaagatgtcatagttaattgtatgcttgcatatatgccttatattatcgaacatataagaaaagtggttgtgccttatggaatggagggagcaacagcgttcttttctaaacttatgtgatatgaaaacagtacaaaagaaaaatgcactaatggtagcaatgaaaagtttagtttcagagaacgtgatagatcaaaattgtttcttcttgacaccataacattatcttttttaaaaaaaaaatgttcgatgaaatgacaatggagtgagtaaatcgtggcgacaaatgacataccgaaggtggcggtgtggaacgtggtgaagttgtcggcgacgctgcggccggcggacacgacagtgacgcccttgccgtcgccgacgaacaccaggttcgtcttcttcctccccaccttcacgttctcgtcgtaccgcccggccttcacgtgtatcaccgtccgccgcccgctgcgctccggcgccgccttcaccgcgtccgagatcgtccggtgcgtccccgtcccgtccttcgccaccaccatgtccgcgctctccaccaatggcgccgcggggaccagcagcagcctccggtccctcgccgacagccacctcgggaagaggcttcttcttcttcttctccctctcttcctctgcttcttgctcttcccgccgccgttccggacggggacgccggcgaggccgtccttgttgctggttgccatggccgccgacgcggcctccgcgtacattgtgaggcagtcgcggaccatggcgcgggcggcggcaaggtggggcgcggcgtccgcgccgtgggggatgccggcctcattgaggctgtcggcgcaggtgtcgtggttggtgagcgcggcggagagccacgtgaccgcgtcgtcgtgggcggcactgggctcaccggcgccggcaaggaggtcgagggagtcctcgagcagctccgcgcagtcgtcgcgcgcggcggcggcgaggggcgaggaggaggaggagcccgccgagaacggcgttgtcatcacagcggaggccggcgcgacggcggcgcccgacagggcctcgagcgccttccccacgtgcaccgccgtcgcgttgagcgcaatgcggagccggtggtggcgcgccgccacagcctccgcctccagcgccgaggccgggaaggcgtgcgcgccggagagcggcagcaagaagcaggggaggaagacgaggaggaggatgaggcggcgagcgacggcgtggcccatggcgagccgagctagctagctatggaagctggaagaagtcgacgaggtgctggactaccagcgatggcggcgcggccatttatagggcgattgggggtggcgagaatgatgggacgcgcgcgggcggcgagctgggaagcttttgcgtctcgcggaaagcgcggcatgtaccgatggtttgcctgccatcgccggagaacgatgggctcgctcagctccggcggcggccgcgtccgcttggtttgttcgccgatccatgggcgcggcacgagacgagagccgcgtgggctgggctaccacagcagcacacatgcagatgcactgctcgtttggcccccaccccacctggctggcgcgcccaccgcgcggcattgcgcttgcgcgtgtgcgcgcgctagctagcgcgcagtgcgtcagtgagacgctgcgtggtctcgcgacgggtacaaatcctgctctgtgtgcacgtacaaaccacggctcacagatcactgatatgtgtcacttgctcttgggcgcatattttcggtctatattactactcatggagtagtagtagagtagtgcacctctcaactaccgtctcacacgaagcttacgaaatgagataaaactaaaaagatgatgtggctagtgaactaacgttattaggtgcatgagtaacatggaaatcaagagattatatcataagtaatgttatttgaccaacaacatctataaaactaagatgtttaaataaaaatagttgcatattattgtagtttgtttaatgataaatatagtaacatcaattttatatgattgaccttttaatattttttttctattaatagtcatagttaaaaaaatgacttgacaatattttaaaaatgcttacattctgtgacggagtgagtactatggatatataaactacttactatattacggtagtttttattcaccgtgtattatctatggtagttttatttaccatgtattatcttagaaacaacactgaattttagtttggatctaattttcttatgaaagttaaggctcctttcgaataaaagaattttggaggattacatttctatcgaaataaattcctatatgatgctttagaatgaaggtattgaattccttctaaattccttataattgtctcaaatcataggtttttttttgcaaaattggttatatatcatcaaaagttcactttttttttctttttatagcatcgaaagatactaaatagcacctaaagctcaccacgttcccatttttaacactttcgttaattttcaatcgtttttcgtccgccttgattactattgactcagccacacacacaatatgatgtttctacccctgattgtcatgcattctacttgtgagaggtagttaggaattcatattcctctcttcttaagaaaaaaaaagtgcgctcacaactcgtatacattcatccatataatatatacacgaacatcttacctttatatgaacaccttgcaaagatcggacatattctttttatctttacacgccttattaacgtacactaaaaatgtgaataagtgaaccctgcatagccatacatgtttataaaagaaaacaaaatagaaaggcacgaggagaacagtgggacagccaaacgtgacggtgatttcacttgaaaaagaaaaataaaatactgtgtgccgatttagacaatgcaaatgcattattccaggctatatatatagctagttagctctgtcgtcgatgcttcttctttttttgtcatttacaattttgctgcacatttggatgtgattttcgtattgtattgtacacgtatatatgggctcacgaagagatagctaaagggaatcgtgtgacattggcacaatggcacatgtgacgagcgcagatggagctctcgcctcgtggaaagaaacaaaaaaagtcgcggcaccgatgggcgatcgatcggtggctgggcgagtcgtctcgtgcgatcgtgtgcggttggtttggttttgctggctgcctcgccacaccggcacaccgcccgtccatcataccacgctctggctgacgcgctgcttgtttgccgtgccgtgtgccggctgcatatcctctcgatcgccctagtacatgccgcacactccattttcagctacctttttttttatgataatggatcttattaggactaactgcaaaacacgtgaccatggaataataacgtgggttcaataaatggaaagctagcaagcttgaaaaacaaaggaaatatatatattttgtagtactaagaaatttgatctacagtaatattgttttatttcatactccctccatcctataatataagagattttaggtggatgtgatccacctaaaatctcttatattttgggacgagtatctcctatcattcaattcatcttgtgacaacttttttctctttacctttctctatattgttgccgccacattaaattgcttctcttgatctcaagcgtattttccgatcataaaagaccgagagatgatcttgatgttattactttgaagttgcacaaaccccaagccccgaattctcgattgggattcacagatccgatttgttttttagaatcgcttggttttcttgaaaccaatggcggaggcatcgtctgggcaggcgaaaactccattaaaattttatattagtgagtaaattggtgatgaaatttctataacaaatactagttatatttatccggttttaaaaaattttctagctccgccattgcttgaaaccaccctgacccaatttgtgaattccaattgattttagttagttttcatacatagttaacaaaaaaaaaggtcaccggttctatggtttgtatcggctttcgcgctgttttggtaaaacctaccatgatcggttttcagttttcacctcgatctcctccgggcaaaccgcgacatttgaaagaactttctcctttacgaaatgcccaaaataaatacaacaagtaaataaaaatggaattcgaaccgttagcgtacgctacacccggccccacgcgtcagtgaaacccaacagtctcctgaaatcaacccgccacaaaggcccaaagcccacgccgagaaccccgccgctcgcattcgcattcgcatctcccccgcttcctctcctccgccgccccaaaaccctagcggcgagcgagcgagcgagccatccatcacccatggcccgcaagcgccgcgcgccgacgcccccgcccccgccgccgccgcctcccgaggccgagtcctccgcggattcaagcggcgaggaggaggaggaggaggaggaggaggaggaggagagggagtctcccgtcgccccaccgccccagaagcccagcggccgcggcgccgcctcgtcggatgaggaggaggaggaggaggaggactccgacactgacacctacgcccaaggtttccagcttcggaaggttggcggcggcgacgaggaaggggaggaggtggaaggcgactcgtcggagtcggagccggagccggagcccgtcaagaaggagtcggcgaagaaggccaaagccgaggccaagaagaagagggccgcgcctgagcccgcgccgtcgggcaaggccaagaaggccaagccggagaagtcgtcgtcggcggcggcgcctgagcccgctccctcctcgggcaagtccaagaaggcagccaaggctgaggctgcgaaagcggctgccgctgagccggctccttctaccggcaaggtgagcaagtacaatttggcgccggagccctcgccgtcaagcaagtctgggaaggccctatcgcgatggacgacggatgacgaggtcaagattcttgaggtcctcgtggcccatttcaagagccacggcactcagcttaaagttgaggggatcatcgctgctgtcggcgatagcctcgagaggaagagcatcaagtattcggacatgtatgagaaggtgcggaggctcaagcagcggtacgaggccactgccaagaaagttgaacacggcggcgacctaccagctaaagaggatgacctgcggatgtatcagctatcgtcggaaatctggggaaagaacgcaaaggatgctggcaattcgtcaaagaacaagaaggggcaagctaagaaagataaggtgagtggagattcaaaggaagccgccaaggaagataaggtggatgaagccgccattgctgtgaatgaaaagggtggtactctggcagagaataagaaggggaaaaccaacaagcagaaaacaggtatggaaacaaaggttggatcatctaaggaggctgctcttgctgctagtccaaccaagggtaagaagaagggaagccacaaagacaaattggatgaagaagcaaagagtggcacggcaaaggtgacctccacaattgccactgatgatgatgatggaactttgggtgggagtaagagggagaaggctggcaaagaggaattggatggggacacacatatcgtcatgccaaaggaggccaccacaactgccgctagcgatgatggtactttggttgggagtaagaaggggaaggctgacaatgggaaattggatggcgacacacacagtgttatgccaaaggaggccaccgctggcacccaaaatggtggcatcctaacaggaggggaaaatcacaaagaaaaagtagataaagatgctaatgtaccaagcatacggagggagtatgctgaattgcagagtttgtatcccaaccttgcttcctttgtgaacggaattgaggcccagcatccatgtggatcaaccttcaagagagcttttgagttcattagtgatgataaggcttgcaccctggaatccaagatcaagaagcagaagatagcggaagtgagaatgcagctccgtctagcagacacgaagaaggaagtagccaatgctttgttaggattgctggactaaaacattgcggtgctgacatcctttttgtgcggtatacattcttcttacttgcgttattatgttcccatttgtatattaaagttctgttatagctaaatgcatttaaagtgtttttgttgcttctaaaatttgagtgtgacttctgaactaattattgaaacaaccctgttcttatgtggtcagtttagtgtgaaacatgtgcaattaaggaaagtgtagccaatgaaagatttagccatatttgacacgtacaaaccatctaaatatttgattggtttgtatatcaagctaacttacactttgtaggtgttgagagggtgagtttgtcatacgtagcaacataagggagtgatttgaatatatcatctgttggattctactattcttgattggttgtaaattaaactgtacctacactttgtaaggattgagaggtaggagtagtgaacaagggaacactatgaataaagcatctcttgcattctactcctgaaatagttagctttaccttattcaaacgcacagttgttgctttgctaggttgtcattgtaatgttttgtacctactatactctactcaccgtgaatagtcattttttggggatggttttcctttgcagaactgagttataatgctttttttttaccacaactgatatatgcaatgtttactggtagtttgtccatatgaatcttgtgctgcaaaaggcagcatagtttattttcaagttctttgtagttttgtttgttaattgtagcttaggttgatataaatagcttaatgtttgaagttatgctttatatttttcaaagtaaattattgtgtgatgtccattgctctagtgaatttagggtttctcttgaagaattttgttggctgctccaactgctcccaataatgccactaaaagaacagttgcatttttacaagccacctgctagtactgacatggtattggatgtgacatttcctagtacaacaaatctgtcaggagcttatccagatttgttgtattagggaatgtctcgtccaatactaggttggttttttgtgggacggagggaactaccttgtcttgtatagatgacctgattttgttgactgacctcatcaactccactaaagaacaacagttgcattctgttcaagctacctgctagtactgacatgggaatttgagtagctaccttgtttgtctagatgaccatcctaattatgtactacctcattttcaaaatgtgtgacgccgttgacttttcatacaacgtttgaccattcgtcttattcaaaaatttaacataaatatgtaaaagtataagttaagattacattttatttgatgataaaacaagttacaataaaataaatgatatttatataacttttttgaataagatgaatggtcaaacgttatgcaaaaagtcaacggtgtcatacattttgaaatggagggagtatatgccaccacacttgtcagtttggtcaagcacagaggattctatgctaagcctgcatttatttcagctgaatttggagccttgatacgtgaatattgatttgtttatgtgagcctgtgaggctcgctcagggatacatgattttttctgagtctctttaaccaagtcacagtagcaactcaggaagttgttcatctagagttaacatacaaatgaaatcaatggtcaatccaaaatccatatatgaatatcatatttaatctttaatttggattttgttgagccttgtggggctgttggcatgaagattataagttggcaccattttagttagttcactgcttaaaggctgagccaatacaaggtagcttagtgtaacagccgtacataacttttctcaatatctcaaatctgctttatttgttttcaaactacaatgatgagcatatgagtgcattgctaagactttgatttgtctgtgcctggacaaaacatttcttttcgttgcttcaattttcttcttgcatccttagtagtactaatttatattgcttcattatccatacacttattctgttcactgttcacaagcagatggttgtattgaagattcaagttgcagaagatttttggcttgtggagctaagggatatgacgtgacgagttgagctactgggttttctgtctctggttctcgagagctattctgtgaacggttgtttatgtgattagatggtagtatccctttaatctatgagttagcaatggagctgatgacagtttaattaactcctgtatctatgatggcatttggctttaattaggaggtgtgcctaattaagggggttctataactttgggatatgcgtgatgctgatattgacccgaaatcccgtaatcctgcttattttgttgcccggtttattcgacctgcaaccgtttcgttttgttgtaatgctccaacatgatctcagtctcgtacaattctgtgcaactaagtcatgcttattcatgaagtgaaaaatatttcatttcattacagagagtgaagaatttcagtttccggatgcatgatttgcacgctacgactacgatcatcttgatcaacctgtacggttctccaaatttgattcggcaatcgacttgcaatgcagatagctctgaaccatcatccctcatttatctctttagggttaagtcttatttacccccttcaactatcatgaaagtaaaaaataccctcatcaactctaatactagataaatagctttggccgatgtccaaagtgtgagcttggtgttgtcttgcttgtttaggcggtgcctccaacgatgtcgcgatcgccatggagtcggagttgctaggtcgctgggcggcaagctcggcaacgatgacacgtgccttgtaatatcaaacttgtatgccacttcttcagcatctcaacatcgacgttcgctcttggattccgccgttgtttctttggtagtttggctagtgttgtttggtgcttcgtgtgttgtgtggttgtaccagttgcggtggaggaacttggcgagtctctacttgtcgagaggttgttttatttttctgtaacccgtctgggtttttactccagcgagaggttgttttatttttccgtaacccgtctgggtttttactcatgtttaattgaaatataattgatagttgtcctgccggtttagtttcaaggacgtgactagacagacagtggtagctgatttgtctaaatcaactaccactctatctaagaaggacacaatccacttatactttaaatacaattttctcttaaactactcatccgatctatgatccgattgcactgttgtattcgtaacaattaaatctttataacaagatcttacatgattatattttcatgaaaaattataaattacttttatcatatatctaaattacttttagatttcactaaattacttcttagacatataaaagtaaattcaataaagtctagaagtaatttacatatattatagaagtaacttataaaaaaaagtaactttaatgaatgccttttttcatcgtacgagaagtcatatttttatccctacaacgaatttagttactttcattttgttttaagttacttttataatataatatatgtaaattacttttagactttattgagtttacttttatatgtttaagaagtaatttagttaaatctaaaagtaacttctatatatgataaatgtaacttacgtatataataaaagtaatttacaaatataaatattttttcatcataatataatcatgtaagatcttgttgtgaagatttaattgtaacaaacataatggtgtaatcggattgtagatcggataagtaatttgagagaaaattttgtttgaagaggaaaaatgacatgcatgtctattaaaaaaatgcatgcatgtagtacgatgtagtaaactccacgtcttctccatattcaggtatcaccggttaacgcaaaaatgagaggcctctccgaatagattttacgtttcaaaaactattcgatccggatagagaaaccccccttcctcccatttaccggcggttttgggctaattatagagattaatctcctaatgaggactgaggagacgggcccagcctgtcacgtgaggagcacacgatggagttagctactgcatgtagaggccatgtcactctgtaattggcccaaaatggttcaagagattagtttaatagtatagccaactatcagctctaaatcatttatagtcaacctaatagtcattcatataagagcacccgcaatggtaaagtaatgtgctctctataaaacatgtacatctcagcaatatactcgattaatagtaaaccaccttaatagtatgtctacattggtatttatagctctctcatgcattgcctcgtttttctctatagactatctctaagttagtagatagctttgctctctctcttcatttaatacctttcaagtaggaaaatatgctgacatggatttcttgtagagagtatatagataaccattgtgggtgccctaatagttaattacaaatatatactatatcattaataactggtcccatatatcatatacacatagtgttctagagttcgtgctgcagctggctacaaatctatagcccctgtcggctattttttttttcatcctctgcgaaccgtctcaccggaaggaagctcagcgccatgctcaccggaaagaagcagtcgtgccgtccggtgcctcctgcaccctagtgttagggatttgggctctagaggatggggaatttgagggaaagagagacgagaggagggaattatttaattttttgctatgtcatccgtcggagtgtcatgtgagataactctggaacaaaactggctataaatgggaatgagggggttgtgtgtccggactgaatagttatggtgaaaatgctcgatcggtcgactgggggaggggggaaatcggtcgctccccctcccccacgcgcgcgccccgctggacccacccacttgtccctacacttgtttcacaaaagatgtttcacctagtgtacttataatgtctcactatgtatagatctaatgttgcagtgaattaaaatattcttttgcaacaaatcacccacatattttagaaaccctttattaagggaattcgtttcatttttttgttccacccaaaatatttcatctagtgtactcataatgtttcactatgtatagatccaatgttgcagtgaactgaaatattcttttacaacaaatcacccatatattttggaaactctctattacgggaattcgtttcattttttgttccacaaaaaatgtttcgccttatataatgtttcactatgtatggatcaaatgttgcagttaactgaaacattctttcgctatttgctgaaacctgtttttatataaggcgaaacaacgcccgatttaaacgattgaaacattttcgatctacttagtgaaataattccgatatacctggtggaacatcgtgcaacatttaaaaaatatcaataataagctaaacttttttcgtcggaatatatccatgggtggttttgttttgaagatttaattgcaacaaacttaatggtgcaatcggatcatgatttggataaataattttaaagaaaaattagtttaaagtggttttgcacatatgggtggcgctgatgtcagcgcccgctttttggagatttgtatcgggcgaccgatccctagtcatcccctagttacggggtgtgacttgtttggaattagagttgaggaggctaaatcatattttcgttatagttggaggggggggggggtcaatcggacttgagccttatttctttatgcttagctctctgttaatattcaaatttcgatggatttaagtttgagtgtattcttcaaccgtttttgttatagacgtcgaattatttttttagcctgattagtcgaatttatggctggttgatctacatcaagatttttcttttgcagggaaaatagactttattaaatcacacgggacctattacaatcgtttttgataaattatgagttctcaatatttcaaaagcccatctcagcacaaatcttgacaaacaaagctagaagggactattactcagatttgagtgggtttgagtacaattctgctttgcggttatcgaaagggacaattacttatttgactctattttagagtctaaatatcaatttggccctacttcttttaatttgcttatttgactccgcatttgtaaaacgaagttaccgtttggtcctatttccatttcgctgttaggatttcatttagaaaaaaaagaaacaaaaattcaaatcatattcaaactgaccaaaaatacgcttgaggactctaccctatccattcaatccctaaattttattactacttcagaaacaggcacatgatttatgcaatttgctacactgattgtttttgaaagatctaacctaacagaaattattaggacaagctatatgcgagatatattgatggaatgatgggtcataaaccggagaacttaattactgaactttggaagccatagtcaacgtgggcccatatttgaagtgactttaaaaaggagacaacagtgcattaccccagttaatttattttggaaaaaatacaaattaccccccgaactatcgcgcctgtccgaattacccccatgaaccacaaaaccggacattcttcacccccaactatgcaaaccggacgaattaccctcctcgaaccaattcagagcggttttgtccaacgtggcgcacatgtggcaatccggtcagcctttttttaataaaaaattgtaggacccacctgtcatactcttctttcccctctctctttattctctcactctctctcgctcttttctctctcgccgctcacgcagcgcgcacgtgaggacggtcggcgaggacggcgcggggacgggcggtcggcatgggcggtcggcgacggaggaggcatcgagcgcggcggtgacaaggcgaggcagcggtggaggcagcgagcgcggggaggcaagcggcggggtagggcagtggaggaggcgagcggcggcgggagctcgcgctgctcaaggcgaggcgaggcggcggtggaggcagcgagcgcggggaggctagcggcggggcagagtgatggggcaaggcagtggaggaggcaaaaggcggcgggagctcgcgttgctcgaggcgaggtggcggtggaggaggaggcgagtggcggcggggtgtggcgaaggaggcagcggcagcggtggaggtagcgagcgcggagatgggaccaatcgcgtcgcctgtcgtcgtcgctcgcgccgcgcgccgtcgccatctcccctcgagccccgccagtgccacgcgccgtcgtccgtcgcccgtcgccgccgtcacctcgagccccgtccgcgcgccgtcaccccgcgccgcctcgcctcctccgccgccacgctcgcctcctctgccgtaccccgcctccgccgcctcgcctcgccttgagcagcgcgagctcccgccgtcgctcgcctcgtccactgccctgccccgccgccctgccacctagtccccgcgcgccgccggccaccgcgcgcccacgacgaggaggaggaggagcccgcggtggcggcggtgttccaccgcgcggaggaggagcccgccgcccgctgtgtgtccccgtgcgcccggtcggcctccgcctccgtcgcctccgtctccgtgtcgacgtccgcgccgtcctcgccgaccgctcgtccctgcgctgtcctcgccatgcgtgttgtgcgagccgcgagagagaaaagagcgagagagagagagaatagagagagaggaagaagagtatggcaggcgggtcctgcattttttaattaaaaaaacgctaactggattgccacgtgtgcgccacgttggacaaaacctctctgaattggttcgaggggggtaattcgtccggtttgcatagttggggggtgaagaatgtccgtttttatggttcatggggtaattcggacgaccgcgatagttcgggggatagggggtggggggttattcatactttttccatttatttttaacggcagtcttttgtctatttggcaccttgttaggatcgttcaaaaacttgtcacgtcacaattcgagatttcgatagcaaaggacacatgtacgtttttttagaagccttataaaaaattgttataaataacacaataagatggtgaatatattagtagtagcatttttgtctatggtgaagttctggagtagtgctttctgaaagataaacacatttgcaaacacatcatcgcctatgcgtcagcattgcaattttcttagtcagtacacacgtaaatgcaaaccaatgagcaaatgtaataatatatgaatgttccattgcacattccgaatacacaactgatcatgttgcaacaagttaccaagaaagaatatttaaatttaagccaaaaatttagtttcggtgatatatttggcccctctttcatctacatagtttaatactctgatcccttggtgtattctgatacaagtttcgaaaataacgatgaattgtcttccagaagttttgctggcgagtcatcctctgcgattttacctgtttacaacaacatggaattaaaacgggagaaccaagctattaaccgttggctactaattaaacacaaagcacatgactaaccattgtccagaagaatgaccttctcactatcaagaacagatgcgatcctatgtgctattgtaatcactgtgcattcgaaaaattgttgcttcagggttttctgaatcaaattgtcagttattggatccactgaagaagttgcttcatccaaaaccaagatctttcgcttctttagaactacccttcccaaacaaacaagctggcgctgacctgcactccagttgttgccattttctgtaactatatttcatattaaaatatcagttatgacttatgagtttgacactgtggagcaatgcattatagctttctgatatagatataaaacctgcagagtcaagcttgagctcattctttctaacttcatcgccaagatgacaagagttcaatgcctggataacacaacaaatataagttatgcattagtttgacaggtgcacattgaagaattaaaatgtcagtaaattaaaattaaaagacctcccaaatttgttcatcgctgtactcctccaaagggtcaatgttatttcgtagggtcccctcaaacatcacaggatcttgtggaatgatactcaatcttgtccgtaggtcgtgtagtccaatggtgcagatatcaaggccgtctatcaacacttgcccaatagatggctcgacaatacggaatagcgcttgaatcaaggttgacttgccactgccagttcttccaacgatgccggtcttcaaccctccgggtaaagtgcaagtaaggcctttcaaaacaaaaggcaattgtgttgcataccttacctgcatcacatacaaagcacttagaggaaaaaataacacttcaccagaaatttctgcattaggtgttgtatgttttccatgttaagaaagaagatatagtgttgtgagggtatttccacagtggtatgctggaagtcgtacaaaatagtatattatgaaagaggattgcaactctacagtactagaaaaaaaatctgcatgccaatttttgtggaataacttcgatataaaattaatttaataacacactgtttttctcagaaaatattatgaatagaaatgttgagagttctaatcaataattgacatagctccgacattgttagaagtgaacttatataacaacatagagttcaagagacaaacatggaggttgcgaagctcaatttcaccatttgtcggccactggcagtttggtctactttttgatattgtaaggagttgttcagaaggaataaacatgtattgaaaaattctttcaacggatatcattctattttccaaactacagagcactgcaatagcccacccttgcaacatgttcagacttaatccataagtgactgcaagaccagctgtctctgtgagaatacaataaaaataaaaataatagttagcaaggatggtaatacacataaagaactaatttgatcggaccaatcaaattaaagcccactgtacttacttgggtcaattagagcagctggcaaggtgaccagaagtaccaaggcaaatgcgaagataaaggatgaaagaatgtccaagcgaaagcacaaccattccattgaagcagaattatataaacttggtctagataaattatccatgaaatgactgacataattgataaactgtctttccttgccaaagcatctaataatatttgatccagctactgattcagcaaaatgttgcatcagcggagctctgcaaactccagtcaacctctgcaactccctagcaccatctatgtaatattgctgaagggaaggaattatggtgattaaaaataaaaacaaaacatgagtcgtattgaaaccaataatgccataggacatagttataattttgaaatatgattacaattattattggttaatagcatattttaagactaaaagtttgattgttcagaagaacatcggaaatgcacaagttctcctatatacagtagcatcaacctagaaattttattgggaacatttttgccaagaaaagaatcacatcatatatgtacctcatgtttttattatgtattatatttaattgctttgccatgcctttaaatttcaaattaaatctgtgaaaagaaaaaaacactgattttcaattttcaattgaatctgtgaaaaattgtcaataatgtcatgaattaatgtatttttccttccacatacttaaaaattataaactggaaccaaaaaatggcatccaacataaaatatataataaaaagaatacctgataccacagagatgctgcaataattgggacaaaaattacgaagactggccatgctacccgtgacattaaaataattgttccaagaagttcgataacaggaaatagaacatatcccatcaggtcaaaaatgctggtatccactgtgctttgatcactagaagcctacaattttgtttcaactttcatgattaattgaatatgaataaaaattctaatggtattccaaggagataacttcaattttctcattaaaataaagatggtgaaggtaaattacttactctgttcaagattcgaccgctaggagtggagtcaaagaaagacattgaagcctggaatatgcatcgatgcatcttatcaaatagcatcattgcagtcttacatccagccatgacaagaagatgggatcttatgaaaatgaataacgagctcacaaaagctaacgcaacatatacaagtaccattttcaagctattgactggaggattcacatctttggatattggagcagcccaagccatccaaaaattgcttccaatttgaagaacttgaaaaattatctgagcgagcaaaataagcggcacaagtgctccaccatatgccattgtaatatatttccaatagacagaaatcccaacccgccctttctccctttcttcttcttgtaccaactgaccattttgaacaatcccttctgctccttcattttcatccttttgcttatcttgtctgaaaagcatacttccactgtcaccaggaataagactactttcgggattgccacttgagtgttctaaactttctagagtagaaatgtcatccttatgggaaaatactaattttgtgaactcttctccagaattaagtatttcagcgtaattcccaacttgtattatttgtccatctttcatgacctggaacaacgaaatgaattgacaaggtaaaacgattgttgcgagtagaataaataagtagatttgatagttgttggaagctcaccatgatagcatcggctgatggcaaaaattcgacatggtgggtaacatacactacagtttttgaagctaagagtccaagtaagcactcctgaaaaatacaaggtcgtgttgaataactttcatacagtagatatactcttgaaccctgaatattgttcaagaacaggctacctaaaaactgtttagctgaaacatacaaaagatctgattaagacattaggtttctgtccacacaataaactatgcaaagagataaactgctattacttattttggaagttgggaaatgaaaaatcaaacaaaacaaacatgttctattcgtctaaggatttgataacggcactagcactgacaactgaagaaggttaaaaaaaaaccccctaaattgactgggagaaaatggcgttgaaatcatatgatgtaaatatatattttgtagtattagaagtcttaagtaccaacaataagttattagtttaagcattcagtgatgatttacacacatatagaaataggatttaaagatttgttttgaaaaataccttgaacaagtgcaacccagtatgagcatcaacagcactgaagggatcatcaaacagaaagatatctgcatcttgatacaaagcacgtgcaatttgtatcctttgcttttgtccgccacttaggttaatgcctctctctcctataattgtctgatcacctaatggtaatatttccaagtcctttttaagacagcatgcttcaaggaccttttcatacctttccctatgcagttttgtgccaaaaagtatgttatgttcaattgtcccactctgtatccatggcgattggctaacataggcaatcctaccacatgtttgaacatctcctgataacctcggtatctcaccgagtatgcatgacaacaaacttgattttccagatccaacagttccacagatagcaaccctcattccttgtcgaatacggaagttcaaatttcggagagtaggaacctcagaagatgtgttccaagagaactgaccgttcctcacctcaatcgatacatcagttgtacctcttggaagtttagttacaacatcgctcgatagttcctcgaggtgcataaaagagcatatcctgtcaagtgatacttttgtctggatgatcacagagactgtgtctgggatactattgattggtccttgtagctgcctaaacgttgctagagcagacaatactttccctgtttctaatggaatgcctagaagcaaacaagttccaaaggtgaccatagcaataaaagcaggagctccaaagaagacagatataagcatagctgaggtgtatacatctttctttagccaatgcatctcctccttcctcaactccatgatcttcgacaagaagaccatttcccatccttgaagcttgagaatgcgcatgttccgcagcatctcagacatagccctcattctagcatccttggcatccatcattttctcttggtaattttgctggatcctccctataggtagatttgctaacattgtcaaaacagtggcagcaagggctgcaaatgctgccaaaccaagagtggagtataggatcagcattgctagaataacctgcacaggaaacaaccaaagctcatgcatggacgaattgaaacccgcgacacgcaccgcatcaacgctcacggcattgatgatctctccacttgaaatgctttccctggactgatttgagagggagagacccttttggtaaatgatggcgacaagagctgagcgcacccgcacaccaagttgttgcgatctgaagagcaaatgccttgatgagaggcctttgatgaactgcgcaacaacaaaactcaacaccaaaatgtagccttctttagcggtccgtggacttcgattcaggtaatcaacaaagtactcaatcaggtatggaccaacatatgaagagacagtacggagtaaggcacaaactgcagtgaagaggattaatttccaggttgtaagaacaagagctttgaccagcttaattgttgtaacaccggtgtacttccctgaaccagaaactgagatgagcttcgcctcaaagttagggaggatgccttgaacactgtcattatcatccaaagttggcacatcatcaagatctagtgctttcctccttccaagatcaagtaacggccccatccaagaaaaagtgataacactaaagaatccagcatctgtgaaagctgctctactgcctgtggccttagacgaggaagaagctgcacggtccaatagtggctgatccatgataaactaataactcctgaacatagaacaacaaactttagcaagttacaactgattatttatgagaaagaaaagtataaaagtgttaacgtaaaaatgataatttaagtctgttcatggacattaataggattacagaaagtatagctaatttaaaggaaacaaacataactgtgagtgttaaagccatatgttgcatgaaaaacatccggatgaatccgcacgataccacagaattccattgtcacacatggtcaagatgatatcacaaatctccaagtaaacaaaatcgagacctagattacataaatagcatatgtaatatgtatgtaatctaatatgtgctaaacttcctagaagtaaaaaaaaaagaggatgtaccgaacttttaaatttagcaattgagtttttttttaaaagtatccgatctcaccatgcccatctcagcattgaagcacagacttaataaaaatagcaaaattagtgcaacagactgaaaatgagaatatatattacgcattactccttgcatacctcaaaaagaaagaaaaaaaaagcacgcatgtggaataggatggtgtcagccacaaatcgaaatctgtgcgaaatttttgtaaattaaccagatactggctattcggtgggagagatggaggagaagagaagttggcgatctcgagccctccggcaaagaggcggtggtggcggcggcgatcacggagagcctataaatgaatgcggcggtgagggtcttgagcccaccagcggggctagcgcaacggtgccgagccgaccgaagaggagcacggacgtgccgctggtggctggggcaagccgccgccgccgctgccgccacggccatccgggtgtctgcgtggtttttctcagtgatcagaagttggaaagaagccgcgtctcactgaaaaatttgataatttaacgcttttttccgttgcccaaattaatttaattgacgtttgtaaagatcgccgccacggccatccgggtgtctgcgtggtttttctcggtgatcagaagttggaaagaagccacgtctcactgaaaaatttgataatttaacgcttttttccgttgcccaaattttaaggagtgttaaattatcaaatatctccgtctcgctcgactcacgtgaccaaaggagacggaaattacctatgcttgcggtacgtgggttttttctaatttctcaaaatcttataaaacacatttgtttgttatagatttgggtggcgagtttattaacgacttaaaagtaattcctatcacaattatgaaaaaaaagctgttatagaacttatttgcaaatctgaaccccggttttcttcacagttcacacgctgtacgaccgtagcattatcaatgtcatgcctaaaggttattttaaaattgagtaaatttggagtttatttcaaacaaaacaataaaaatgttagttaagttcaaattagtgcggattacggatttcacatatgtaacgcttgaaaccaatatcataatccccgcttgttagtaacggttcccttcttccccttaccatctattttcctccatgtcataggcaactaactaaatatcttcaacgaatgttcacttgctctcgttctaggggtgggggtgggtgggcatgagttgcgcaggcagccgccctcctattcaaccggcggtgatttggagaactggtccggtatttcacgaggctcaaaatagtttgtaaggggtaaaaaacaatattaaaattcggggattcgtgaattaagagcaggtttattagtgtagtaagctaccagcgatagtatttgtccgtgtctgatatagccatcaagagagaagctcatgcgatgaactagctgtttcgctagctaaatggaaataaacaaacatttaattcatgcatgcacaaccaaattggcatgatcaaaactaaccaccatccttgtagctatgtgtgttgcctgtgctctagcgtgttagatagggagaaaaacagaaatacatgcaaactagatcgtggagatatgtcggaggcccaccaaatacgtaggtatcacccatatcagctgcaagcgagcagtagaggctcgtttcttacactatcgcccggtgacagatctagcgtccgctttttctctttcttcttttctccctcacccacataggatttcgctaatgtggaataacgtatagcctactgactcaaccttattatatatacctgctctaagaagtgtaagtcgccatcttcctcctcgtacatcgtaattcgttgtaaagaaaccacctcaacaaaaacaaacacgtgtgtttccatccaaaactcatcccaccagtaaaaccagatggatgaaactcaagccttgcaaattttccttctaatccctttgcaaagtaagggtatagcgctagtaaaatttagaagttgagttaagtaatatggactattttttttgaaaaatgaaataaaattaagatcgttctcgaatcgggtatacatggatgaatacaaaggaaaagaaaaaaaaggaccaatgtgaagaatcaaaatagagatgacaaagtctgcaggcatatacttacctgctagcttcttcgttatgcctaaaagcctaacaaatcgatcagaagatcggccgctccccttctcaacgccggctgctgcctgctatgcgccgtgccaaggccagccgtcttccacggggtttcgtagcagaaggggttcatatgtactgcactcctgtatttgtgtggggatttttttattacagtacaaagtacagatttgtttaggctaatccaatagaggtaataatcatatagaaggaaaccattgtattcgtacccttcttatgtggagaattaatgccccttttatttgacacctacagctacacaaaagtatgattagtcaattaatgaaatataatcgtacctgccatatattgaaatccaaatttacagccgtgggcctatttggcaagtttagagaatattgcgagtttatagaagggaaatagtagtgtggctgcattcggcatgtttggcgatggagaggactgatagttttgagaggaaattaattaatagtaagattagaatttgatttttaagtctagcatgttttgcgatgaagaggatggaaagttttgatgggaaattgattaatactaagactagaatttgactttcaaatcctagtatagcatgtttggtacaagtggtgcgaagtgatggaaattactactccgtcccataatataacaaactagtaccgaataggacactttatagtataacgaatccggacatgcttcctgtccagattcgttgtactatgaagtgtcacatctggtcggagggagtatcttcctagtttctctataaaagtttggttagtcccttcggatacaagaatgaatatatatgtctagattcatcaacatctatatgaacgtagatccaatcccacaaccgaaaaaaagtacaatttcctataaagcgaaaaacaaaaaaaatccataaaaaataaaaaaaatctagaaaacatctagaaaggatttatatttgtcgttttagtagtccatatatatctcttctctatctctaatctaactaaaaaatgcgcggaaagataaaaacggtttaaaaaaacacgtgaggaaaaaatatcagaaaaaagcacaaaagaaaacacgctagaaaaaaaggttttcgtagtaaaaaaaacacgcgagaaaaaaatatttccatcgtctgtaaaaaagcaaaataaaaagcatacgaggaaaaaattgtcagaaaaaaaggctaaattgatggacgcttggttggttaggatcatcgatttttttttcatctcctaggcttttgtttcatcatctattctcctgtattggagaccctgcacacctctgtagtcaattatcatactattttttgtgaagtatagctactattcttgataacatattatatggaaataatattagaaaataaacatattgtaattgttatttagaaaagagtgcacagtggctctattttgtgtagacttgaccatgcgagtcagtgtaggatttgattggttgtaagaatgagattaaaataatatttaagattatatgcatgttgtcacatgaataatccaattattttaggtaaaccaaacatcggtaaggttgccatcatcgaggttgggccattacatttaagatgttctaattttctaattttctgattgtcatcaatatggttatgtatgaaaaagtatattatcattaggttttttcatccgttgcaaccacaggtatgtttgctagtatatataaagaaactcagtcggacgtccatggtagagtgaaatgtggaaatcaactaaaacaggggagaaagaaatagagttggtttcaactttcaagaaaagaaaagaaatagaaaaatacacacaacaagggaaagacgagttaaaagaactgggacttttcctcacaaaaataaaagaagaaatcgattgggacttaggggtttagagttagcagtgatctctacgatcgatctgttgcattgccacctcgctcgtgctcttactttaatctgttgcattaacacgattgattctcaaactttggtttcaagaaagaaaaggactcaaattcacattgggttctatatataggccttgtttagttaattagttccctaatttttttttctaaaaaacatcacatcgaatatttagacacatgcatggagcactaaatatagattaaaataaaactaattgcacagttaggggggaaatcgcgagatgaatcttttgagcctaattagtccatattagccataagtgctacagtaacccatatgtgctaatgacagattaattaggctcaaatgattcgtctcgcggtttccaggcgagttatgaaattagtattgtcattcgtgtccgaaaaccccttccgacatccggtcaagcatccgatgtgacacccaaaaattttcttttcgcgaactaaacagacccataatttgtcacgcccagaaattcactagtaatttccgaactaatttgcgcataaaattcttgtccaggaatcaaccgaggtacacaaactgacaatttaatatacatattcatcaaaagaactaaagcgataaatacttactgaagaggcacttagtcctcacaacgaagaaatctgcagcggaaaaataaaaataaaatctggcaaagcttcggctccactcccacagcagctcaactggggtataagctaagcatcttctccttctggatcatttttcttcaactgagatttgattgattattgcaaggtgagtacatggaatactccgcaagccacacagcaaatatgcaagtgcacacggataccaaaggatggcataatataggctcatttgcaaaagcagcatttagcaaacatttaggagtagtaaataagtagagtaattaatcatcaatattaatcaacactgaatagcacacccatgctgcaggcccaaccaaacctgaacaaccaaccccggtcgtacagatcaaacctctaaaccaggaatttaccattccaaaccaggagtcaaattaattatcacattattatcattaatgagtagtgtgggactaatcacgaaaaacattgctcaacccacccataaccgcgggcatggctattcaaatagttttactctggccagaggtgtacaaatttacccacaagacataactccacaatatgtcaccatatcaccatgtgcccatgctgaacatgccaccatttgtgtagttgtgacaagacccctcgcatagctcaactcaaagcagcgcacctttcctggatcataatcaccccctctacaaccagaggcgtggactccccagcgacccccacggacttctcgccgcttcacagtctagcgccccacaatgagccttgctatacaaagtgtccagccgttgcccattctggcttgtgattagtacggttaatgtctcacaacagtagcttgcgaaccggtccttaattgtcatgagcatgaccttcaaaaccatgtgctcacaacccaccattatcaagttttaattatcaattatttatcacaacacgattaaccatcgtgagctaccataaagtatccatcattaagtaatagtgaaacattaatcatcccaatagtatgctagtgtttctaagcatgactaagcaattattctaatatatagtcgaaccaatatataaagtccaactagtcaaattataacccaaggtatcaaagaatagggtaatcaatgcaaattggccataacaaatgaataggttcacaccacccggtgacatttaaaaataaatgcatagttgaaataaatagagaatttaaatataggagcaacatgctcaaatgattgtgtttaggatctgtgtgacttgccttgcaataatcggtcttcaattagtcttcttgaacacttctgacgcactcacgaaccttcacaacgacggaaatgacaagctaacatttataacggagaaaaaactaataaaaaccaaataaacagtactaaaaagtaaacaaacatgtagatcatgattttagatgaatttagagacttgaacggcctcattccgacttcatatgaattagttatgaattttacaaaattaattccaattaaacctattaaagaaaacactattccaaattgattaaacaatttacaaacgatttatactgagattaaagattaaaacatcctccgaaaattattggaactaatttagtggatgatatatagtaaaaagaactaatatgccattgaaaagggataacatgatttatattgactttggatggctgagattaatcttgaccgagtcgaccaagatcggatggtttggattgatctggcaagctggcctcacgagataccgactcaacgagtcaattctacgtgacacgggatcaccgaaatgattaaccgaaaccggcggctctgaacggctctaaactaaaggacgactcaacatggacgaacgaacgaagcacggggaacacctcgttcgaacgaacgagcaaacgactcaacaatggttgcggctaaaccgatgagctagacacgattcacggtaaaaccctggtacgacaaacgataggccggtagaaacctagggatgcacctacggctttgcaactcggctaacggactacgggaagcaaacaaaccacgatgacgatgacgtgggatagaggcggcgttgcacaatttggagcaacgactaagcagcgacagtgacacggtttagcagcggcacgactgcgtcaacgacttggcaaggcgcggcagcagcaacgactcaacaatgacttagcaagatggctaccgagctacggcaacgcggcagcgacacaacgcagcagcaagtggctcggtcgctgcggtagcgggacgacatcgacttttggcacgcacgagcagcagctacacagctgtggcagggagcggtacaacggcggctaggcggctagcgcagcggcaatgctaagccaacagctaagcgcggcacggcggcggctactcaacgacacaaacaagagattaaaacctaaactgagggaacacagatagaaacctcaccaaaccaaagcgatcggagagggagagacggcgatgactacccggcggcaacacacggagacgacgatgacgctagacatacagcggattagattagattggattaataccctaggaaaaaaacctaaatcggtgaacggcatgggagcggtggttgcaggcgaaccacggcacaataatgcaaacgagggcaccgggagaaagagaaggcgacggcgattcttaccaacacttatgcgacgacgaacagtgaaggagatggccggcgacggactccaaagggcggcgaggttcgggtccacggcagcgacgattttccggcgacgagcagcggcaacggatggatggacgggcttctccccggctgcgacgctgtgggtggcgacggcaaagcttggcgacgacggaaggagcagtagggcctcgccggagatcaaaacgcgacggcgaacttcgggttgacggcgacgatggagctccggtgggtttcggctacggggaaggggtggacggggtggagcttgaccttgcggagccgagagaggcgacggcgtaggtcgtcgacggctgaggcggctgctaggggcggctggagcggctgccggcggtggacggagaagacgaacgcggcgacggcgctacaagcgacggcggagagagggagaggtggcggccgaaagaggagagggagggaactctatttatagccatgggagagagatatcgatcctacaacgagagaatcgaagccgggattttctagagtttggtttggagagataaactcgaaaacgaatccaaattcgcatcgaattcaaagggataaaaccggatttttgggggaagagatagaggaggataagggggatattttgcctcaactaattttggaaatacacgagagaggaggccggagttggagggggaaggcggcggcaatggcggcatcgggctctgtctccggccggctggaggttaggggcgactactgtagcagagggaaggaaaacagactttcagctgggcttcttttactcagcccgattgaaggagggacatgaaatggacttcggagaagggatagaaccagccgaaaggaagagagaatggaccgagaactaaaagtgaacttttctagtttcggcccggaaaggaaaagggtgtttttttattactttcccaattaaattaatcactgaaatgatctctaaattgttaaaaatacttccggtgctctaataattccaagaaaaattattaaaatacttgaacactataagtatttaaaaaaattataagaagaccatttaatgattaatttaatatgcgaatcattgctgaactgctctttgtattattaaaattagtaattgagctctgaaaaattcgagaaaattgcagagcgtatatttaattatggagaatttaataaaaattaaatgcagccatgatttatatttaggaaattttatttctcacatttaacttcacttgtaaattaatgaacatttaacataaattctaataataatttattaaataatttataaatcataaaacaaaaatcaggatgtgacataattgtacaatctcggattaattaattaatttagggatttgctagacaactgccggctagacaatcaaaaaaaaactcaaaagcttttaaaacgcacaatataagtaagaagataaccatataaaattgtaagaccaaactaaacttagtttcggagtcattaaattaacaaattaaatggctaaaaactttgttcttgagtttttatttttttttcttaactattttgttaatattatatctaataattgaagtcgattttaattaatcttgtaattttgtaggtttactaataacactttagcagtgttcaaaatacataatctatatattagctatacagaaatgtccggttttgagcttagaacatatccccctgatgagaaatgtgtaagaaacatcaggaatacatgttgtatctgacatgaaagagcaacaaagaaaataaaaagaaaaatatgtgattatctgctatatatcctcctggttatgcatggttttagttctgttccaaagagtgatgttgaacccccaccaaagaacaatcttcccaattcccacaaatgacagcagcattcgtacttagacatccaaccaaaccactcaaactcattctcaagcaatgcaactaaataaatgaaaatttaaaataccatattattttgccatggtttattaaatataaattagaaaaattctaaaccgttacgagtcattcatgttaaaatgcattttcaatcgtgtgctataaattactccctccatctacaaaagttagacatatttcacatttgagtttttccaaataaattgtttctatttgtagtctttattcacttaaggctttatttagttccaaactttttcatcaaacttttaacttttccattatatcaaaactttcctactcacatcaacttctaacttttttattcaaactttcaattttaatcaaacttctaattttggtgcggaactaaagcccaagaatctcagttactacctgttagctcggtacgacaccatttaagaatctcatcagacatctgcagcattttaatttgttgggggtgctaatgagctttcaagatggaagaaaaattgaaggggaaaaaaaagaacgcatctggcatactggatgctcaaaatcggtggaaggctgcacaacgtttgtactgcccaaattagcagcgagcagagccaatgaaaatctgtaaatcccccacagtaataaaggacatggaaatccccaaatcagctgcagcgagaggctctggcgccgtcctcgtcatctccacactactcctcgagtagtccatctgcacatgaacagcttggtggataggcagatcggacggtcgtccacgggtgatgaacgaacagtgtaacagttttactaatttgttgacaattagtaaaaatctattcgattttcaacttttttgggttcaaatttcctgaaaacttagaatttcagtctgccgattcttttaggactctgacatcttcatccttcctcagaagttagcaacaggcatgggattgcaacagtaattagaatagcttccttcactgttcttcgaaaaaaaaaagaaaaagaaaaaaaggagtcgaggacgagaagagagcacaccatcagttttattttattaagatagcagcgagagatgcatcaagcatcaatcatgaaaggtagagtagctacgatcaggtgtttgtaggaaatactctcaattggctagccacagaacatagccctgcggcatgtagtggcagatggcgtcgccacggcttgccttgaggagctcgaagtacgcactgtcccaggtggtggtgttgacgtggcacacggcgacggcagtggcgccgcccaggcccacgtcggcgacggcgtggaggtcgaccctcagcgccaccgcgtcggctggccggtggcagtagtacacctcgtatagatatggcatagggtggcacgccaccacggcgtcgccgccgatccgggcgacgccgtcggccgctaccacgtacctgcggggctccctcccgtgcacgagcgtggtgaccgcgcgcggcgcgctggtgcccagcgccgaggcggcgaagtcgagcaccgcctcgcgggaggtggcgcagcaggcgcgtggctcctcgccgccgccgccggcggccgtcagctcgctgcaggcgcggagggtgtcggcgacctgcgccgccttgtcggatccagggaggatgccgaacatggcgaggatggcgtccatggcgcggaggtcgaacggcacggcgtcgcccttgtccttgtagatgaaccttggcgccgccgcggccacgccgtggtcgccgtgcggcagcgccagcttcgtgccttccggcaagacggcgccaggatgcaacttcttcattaagaagagcatcccgcgctggatatgtatgcctgcagctgcatgaattcaaatatatattccatgaaaggttcgctgaaatgagtacaaaatctacctatatgttcttacctggatgagccagagaagacaaggcagccggtggagtaggaggcgcaacactacgtggattccagtcgactgggtaagcagcatcagtgaattgggccttgttaccatcttgttaacacaacagagtgatgggatcaatttgattgcattgctagtcaatgaaaatagcacatgcatatagcataaaacgactataatatatactacttactagaatgttgagcaaagatgcccggtgctttaggaggtgcaacactacgtggactccattttaccgagtaagcagaatcagtgaattcggccttctcaccatcttgtgaattatgtaataacagaattaattacagggtcaattttgtttatggtttaattaactactagtactagagaataccaatccaattgatgtagcataaaacagtacttacttggagaagcagggaaggtggctggttgtttaggaggcccatcagcacgtggactccacttgactgggtaagcagcatcaatgaagggagcattgccatcttgtcgatcatgtaacagaattaggggtgaatataattggactaaattactagtactagtaaatgggattaaaaacccactatgtataatattcgaggtagaacaaccctgcaatacttagagcatctccaatagcttctccaaatcgaactctccaaacacccatatagccaactctccatctgatttagctagtcaaactagatgctctctccaacagactctctattaatcctctccaaaataacaatggacccacacgtcagcctctactcctcttcttcttttctctcccccttccttctttcccctttcttttcttcccattcccttccctgatgccgacggcggccgcgcgtggtggctcgatgatgcggggaggcgggaggcgagacaatgtcgacctcccctcgagctgccagatctacaagggggcggcggcggagctcggcggcgacgtctcgcgacaatgaccttgacgacgacctggggagacgacgaccttgacgatgctcggggcggagctcggcggcagtggcggcgacggctcgcgacgacgacctcgacgacaacccggggcgacgatgacctcgacgatgctcggggcggagctcggcggcggcggcggtgacggctcgcgacgacgacgacccggggcgacgacaacccggggcgacgacgacctcgacgatgctcggggcggagctcggcggcggcggcggtgacggctcgcgacgacgacgacccggggcgacgacgacctcgacgacgacccagggcgacgacaacctcgacgacgacccggggcgacgacgacctcgacgatgctcggggcggagctcagcggcagtggcggcaacggctcgcgacggatctagaggagggcgacggcgagggcggcggctcgcgatgacctcgacggtggctccctaccgccgccgctgctcgccatcgatttttggcaagcggcggtggtagggatttcagcggcaaagggggagagagagcgagcggatgcaaagaaagagaatagggaataggtggggcccacagatggctagtgagtttggctggccaaatttggctactgaggggaaggatttggccagccaaatggcttggcaagttgaatagagaggctattggagtactttttttttcaagaattgacaaaatttaacttggagagtcttttgaagaggctattggagttgctcttactcggtagatgatgagcaacgaccagcgatggcgtggacggatcctgatctggtttccacttcgccgggtatgcagcatcagcgaattgcccttctccatcttgttatgtcacagaaacacgggttacttaaatgaattgctactgaaaacgacaaatacagcgtagaaatgacaatcaaacattctcactcggcttttctcaagaaaaagaaaattcttactcgtcggcagagtaggagaagccatcttgttattttgtaacagattaatggagtcaatttaattgatgtactacactgaaatgcagatatatagcacttaaacgacgcctgtctgatgatacttactcagttgatcaacacagttattacttaattactagaaaatcggcgtgcttattggcatgcttgcttaagttagcccgtaattttgtgtgtgtggagtatttgtatactgcttaattagaggttatttagaacgtgagaatttttaaagcaaataatccggtacttaaaaagttctatcagcatcatacctttaaagtacccttttagtgtgtttttagatttttttttgtggaatactgaggaaaaaacactgcatcatactaatatacgctaacaaattgatgaaggttgtatattagatgaatagaaaagtgtgttttatgaatatttcatctcacttttataaattcaaaagttttgcctataagctgttaaaaccatataattagaaggaaaatatgttcatgatgtttacacttgctactaattgttttatcttttctagaaatataagataaaaacaaagccaagttatatgtttccaaatctaacctaacgcaaattgtacttatttggattatttctcaatgacttttccaaagcaataaattggtataataagaaaaaatattgcatttttatattttgatttctttatactgcacattcctttttatatatttttattatttatttttttttcttttaaaataatattatataggatgctgataacatggcctatgtacttgccttgattttcactttaatctacagtaaccgtatctgttgttgaggaaatatgaatcataaaaatgacatcaatattgaacgtcgattattattaatttttccaatgtatcacaagttcccaacatataaatatgactaaatatgctaatagctttgtggctgagttttttttttaaactcatggatagctggtactgcagctggttcaggcgttcagttgcacatgcgtgtgagtgcgaatatgcagccggctcaaccggtcagcccgcattctcttgtgtatttgtgcacgcactgccatgggccaaggaccaaaggcggtaagcccattgggctcatttcatggactctgactaggatgccacgctagctatatataggtgcaaaaagttgttgaaaacaaaacttgcactattgacataataagtactgtgattaaatcatatatatttttttataataactctaagatataataattagattaaacggttaagaagtttgtttgtaataagcttttggtacgcgtacgtgccgagtgtttacacgagcggagtaataataataataataataataagcagcacctgctggagtatcatgtccgtggccgacgaacgacacctgcaggttggtgatcttgttgttcgtcctcgccgcctgcgagctgtcgtcgacgtaccggccggcctccttctccaactccgatgtcatcttcgtcgtcgggaagcgggccaagagactgcgcggggcccgggccgtcgccgcgtgcgcgcggcagcagccggcggagagcgccgccgccagcaagagacaggggaggaaggacgacgacgacgacgacgccgccgccgcccggaggctgaagcggcggcgagctgcggcgcactcgttgcccttgcccaccatggtctcgccaccaccagcttcctctagctaaacacacgtactgtgatcaactctttggaaacgaaattgaaggaaagaaagctagctagctaaacgcttgctgctgctgctgctgcgtttggagcgcgcggctatttataggaccgtgagcggcgagccaggcagccagagatcgatcgatcgagccagctacacattatattacacacacgcgtgttgcgtatacgtgcatgcttgcgcagttgcactgcttccgccttgtgaggcagctgatcaggtgagggactcggtcggtctctggttctggctgggtacgtctcgccgtgcaacagagctgcaccgtacgcacttacatatcctcatgcgtgcacgcgtacacgttttcatgctctctacctagctatgttgccatacaaaagtgacgcgacctgcatgtcagtaattaatgatatatatcaagtgagcgacgacaaatgggtttttgaaactgaaaatccagaaaccacatgttatgtcaggctatatatatacataaacgacaaattcccaaccgctatgctatatatacgtgtactcaaatactttatttaattttattactagccttttaaccaagtcagtcattattactgccatgtgtatatatatgcaacacattttgtgctcctattgtactttctcatctcacatctttatatgaatgaagggaaatggtagtttttaggtgactgagatttggtgttcacctgctccctacccattggattgaaatccaacgtttagagaattgtcttcaaccacttctcggcgatggcaacagtgatgaagagatcctcgccgatccctttatctttctcatcgccagagacatccgattgcggtacatgacctacggattagagttagggttttggggctagggttgggggaagccgtggggttttgggaagaaaggagcggtttctcccaggattagggagatggccttctggggtggcctgatcgacgatgagcggcgaggcggcggaggcgctgctggagacgcggagttagaggcacgcaggtgggtagggttggtggcaggggtgagggatgtcatggggtttggaggatgtggtcatcggcagtgaacccgatagcaccacgccgccgccagaagattagagaggaagagagaggtggccggtctagagggggctcgccggcaccgttgatggcttctggctagctagtgagccatggggcgaagtgcggtggcagtggaggcctcagtgctcagtaagaaagcaaggcgtggcgatttgtcctgagtctcatgtgcgtgcatgcgaactagaaaagagaagaatcgttaagggagagataatgagtatgcacaaatcttgatgcgatcctagtcgtccaaaaaagtgactgaaatttttcggatttttcatcagttacattaaagctagacaagaccttatataaatatgttataaagtatacttgtagcatatcttatgtgttactatgatattggattttcccctgtaactcacctgtttatgttttactgggatatatatatgtaatatgctacagtagacatgccctgtagttatgacctcactttatgttgccatacaaaaatgactcgacatgcatgtgaactaatcaagtgagctacaaatggtatttgaaaactgtccatcaagaaaccacatgttatgtcatgctatatctatacatctatgacaaattcccaaccgctacacatttctaaagcaacaaaatgctatatatacgtactcaaatactttacttatttttgttagtaatcttttttaaccaagatagtaactttcttcaattcaaaaattgaaaatcagattggggaaagctgtatataatactctcctaccgctttactctagtactctcctaccgcttgtacactataatagtgaagcgcagcagcagagaagtagccagtattaatgatactactcaaatgtaaatataaaaattatagggactcaattagaaaagtacaaacccaaaaattaaaatcatataaaaatggaatgctctcgaccggtaggttccgtttttgcacacagatctttaatccggcacatcaattttttttcaccaagatatatgagatatcacgatatagattgaaaccgagaggagtgtccctgggatctcggactcaaaccgatgccgaaaggagtggtgtgttttattttccgtttttaaggaggaatccactagaacggataccctcatctcaattgggcggtaagccccatctcaatcgggcatggcggccgtcacaggctagaagtcactgatgtgaagagttatctcaatcgggaaaatggccgtcacggatgattctatctcaatcgggccctaagtaaagcccgtcaccgatagctttgacccagacgaccagtcaaactatagcctgtcacagatgaactatctcaatcgggccacaactagcgcctgtcacagatgaccctgatctgtgacgggcattacctatagcccgtcacagatgagtcatctgtgacgggcattaacccgtcacagatgagtcatatgtgacgggcgttaactatagcctaagttaatgcccgtcacagatgagtataattaaaaaataaataaattttattttttggctagccctcactcgtgtgcacccacgcgagaagttcaaacttaatgttaaagttctttaaagattggcttccgaaaaagtagttgtaacatgttggtatgagtattctattaatcctattatgccctaggccaggatgtcaaattggggttattaaatgatttcaaatggaaaagtcaccaaaaccaaagttgtagaactcatcgaggtgcaaaatttttattttgatcatttctccatttgactctatttaaacaatttgaaatttgaaattcaaagtttgaaaagttcaaatagaattttagatcagcgaacgacttcaactgaaaaagtcatcaataacaaagttgtataactcatcaaaatatataacttttattttggtcatttttctatataacattttttgaaccgtttgaatttgaatttgaaaatatgacaacttcaaacaacattttcaaatactaaatgatatcaactgaaaaagtcatcaaaaacaaagttaaataactcatcaagatctacaacttttattttggtcatttcttcatatgacaaagtgataataacattgttcacaaaattgacatatctcttatctggttttataaactataacacatatatgtaaaatttgtgaataatattactaacattttatcggatgaagaaataacaaaaataaaagttttagatcttgatgagttattcaactttgttgttgatgacattttcaattgaaatcatttagtatttgaaaaatgttgtttgaagttgtcatatttttaaattcaaattcaaactattcaaaaaaaaatgttatattgaaaaatgaccaaactaaaagttgtaaatcttgataagttatacaactttgttgttgacatttttttcatttgaaatcatttactacccgtaaagttattctgacttataaaatgaattattatactgcactaaattattttgctatagtcaacttacaaatataaacatttcatatgaaaaatggaaaaatagtcatcggtgaggggatttagttaatgcccgatagagattaagtatattggccgtcactgatgagtcatctgtgacgggcctaattgttatctcaaacgggcctcaagttggtgcacgtcacggatgatggtcatctgtgacgggccacaacttgaggcccgtttgagatatggaatgttatctcaaacgggtctaaagttggtgcccgttacagatgatggtcatctgtgacgggccgcaactttaggcccgtttgagatatggaatgttatctcaatcgggcctaaactacggcccgtcactgataggtgtcatccgtgacgggctttagttttatactcatctaacatgtctgtgcaaccatatctcaattgggtacttttcggcccggttgagatgacttccttgtgacggcccgctatttctaagcatattagagcccgtcacagatagaaggatctgtactagtgatcggatatagagtcggactttttttttcgtttctgagagagagtcgaacttttttttttattttttcgctatttattttgttttgaggaatgaaggaaacacctcttttttacatagtagagattaagtagtagagaatcgggctgatttttttttgattttttttcgcccttttttaccagagttggattcatttttcttttcgtttattttcgccctttttctggatcggacatatttagtttttcttttctttttccggttttttcgcccggtttttagatcggacagattttttttttcttttttcgcccggtttttttacgtttggtttttcttttcttttccggtttttcacccggtttttttatcggaccgatttgtttttttttcttttttttttagtttttttcggacgatggaagcaccttttattttttaagtagtagagacagacatagagatctctacttaaaaacaggaaattcccgtcctccgtaaaaaaaagaaaaaaatgtccgactcaaaaaaggtaaaaaaagagaaagaaaaaaaagtccgacttaacgagcgaaaaaaagcttccatcgtcagtaaaaaaaaagaaaaaaaacatctcttgtccgactcccgtagaaaaaggaaaaaaatctcctagtaaaaaaacaaaaaagttcgtttggttttctttggcaccggtatttttttctgttttttctttgcacgcaaaagagtttttttatgcagcgcacacgctaagccttttggttgtttgtcccctttttttaacccgatctgttcaccgcgcgtctcccagacgcttttagtttttttcgtcaatcttttttgtcaccggttttttctcccgtgagctttttgtttttctcatctgattttataatcccatctgttcgctgcacgcctcccgaggtgaaccctagcgctgtgcagttgccatatcgatcgtgtgttttctcctccaatttgattgcaaaaatcgattccccaatcctctctcatcattgtctccatgattttcccttcgattcagctttaattgccggatttaatctctattttacacttgcctctctcatcattttctccataattttcccttcgattcggctttaattgttggatttaatctctgttttacagttgccgatgatgacggcgatcttccccagtcatttttatcctgagttttacgctctgattttggggaaaacggaaagagtagatcgagtggataaaaaccctcgaccaattttggctgatctagaaagattcggctagatttgatggggcgatttgattcggcaaatgtacgggcacggacacaggattatcttcgggaggttgaagatggtagtcatattcgggaagttgaagatggtagggtcgaagagaagcagatcaaatggagggaggtagcgcactagcatagggctgaaaaggaaggaaggctttcgaccgaaaacccaggaaatattttcattaatttttttaattataattatagcgatcccaatgttatgatttttattaactttttcaatcatagtgtatagtgatcccaatattttaatttattactcagctcttaatataacactgaaaaaagtcgttacccgttgcaacgcacgggcatcttttctatatattgagaactcataaactttatcattatttgagaaacaggtaggagtagatgatttatgcaattcgctgcactgattgttttcaaagatctagcatagcagaaattgttagattactgaatgaactttggaagccatagtaaaaaaaagtgacttaacaaaggagacaatagttcattagcccagttaatttattttcaacagcagacttttgtatgttggtagcttgttaggatcgttcaaaaacatgtgacctcacaattttagatttccatagcaaagcacgggtacttgactagtcttataaaaaaaattgatgcgtctatgaatcttatataacctatattagtagcattcttgtctatggtgaacttctggatatagatgcaagcggggcgggcaagcggccttttttgtcccgcttatcccacttttagtttttttgtttttctgaattgtgtacaattatgcgaaaaatagactagcaagtgggtttttatatgggtagcggaactacccacttgcatccgtacttctggagtaatgctttctcaaacataaacatctctgcaaacacatcatcggctatgcatccagggatttccgaacaacattgcaatttcttagttccattgcacattccgaatacacaactgatcatgttgcaacaggttaccaagaaagtatatttaaattcaagccgaaaatttagtctcggtgatagacttggcccctctttcatctactaatcatggtttaatactctgatcccttggtgtattctgatacaagtttcgaaaataacgataaattgtcttccagaagttttgctggcgagtcagcctctgcgattttacctgtttacaataacatggaattagaacgggagaaccaagctattaactgttggctactaagtaaaccttaggcacataactaaccattgtccataagaatgaccttctcactatcaagaactgatgtgatccgatgtgctatggtaatcaccgtgcattcggagaattgttgcttcagggttttctgaatcaaattgtcagttattggatccactgaagaagttgcttcatccaaaaccaagatctttcgcttctttagaaccacccttcccaaacaaacaagctgacgctgacctgcactccagttgctgccattttctgtaactgcatttcatattaaagtataagttatgagtttgacatcgtggagcaatgcattatagctttctgatatagatatgaaacctgtagagtcaagcttgagatcactctttctaacttcatcaccaagatgacaagagtccaatgcctggataacatatatacacaagtgaactcttttgcccatcgaatagcagatatgagttatgcatatttttttttaaaaaaaacataggtgcacatacgaagcattacaaattatactacctccattactaaataagtatatttctaacactcaagttttgtccccaaaataagtatgcttctaaagctaactaccctctctcttcaatccatccctcatttaatttggggtatgaatgtcatgtattttctatagtaatttgtcttccatatgttatttagggatggaggtactagtaaatttaaaataagaattacctcccagatttgctcatcgctgtactcctccaaagggtcaatgttatttcgtagggtcccctcaaacatcacaggatcttgaggaatgatgctcaatcttgtccgtagatcatgtagtccaatggtgcaaatgtcaaggccatctatcaacacttgcccaatacatgggtcgacgatgcggaatagtgcttgaatcaaggttgacttgccattgccagttcttccgacgataccggtcctcaatcctctgggtaaagtgcaagttaggcctttcaaaacaaaaggcaactgtgtcgcataccttacctacatcacatacaaagcactttagaggaaaaaaacagttcaccagaaaattatgcattaggtgttgtatgttttccatgttaagaaagaaaatatagttttgggagggtatttctacagcggtatgttgaagtcatacaaaatagtatattatgaaagaggattgcaactctacactactagaaaaaagacctgcatgccaatttttatggaataacttcatgaagaaataaattactccctccgggctgataatacttgtcgttttagacaagggtgaggtatagaatctttgattatgaatcatttttaaaatatttgtctttcaaatatggtgattacatgtatagattagtcttacaaagtactttaataaaatcatatatttattaacacttttatacatattataatgaaaaataatggtcaaagttgtttttttggaaaccgtgctcttgtctaaaatgacaagtattatcaaccctaagggagtaatttaataacatattgtttttctcagagaatatttcgaatagaaaatttgggagttctaatcaataattgatataactccgacattgttagaagtgaacttatataacaacatagagttcaagagacaaacatggaggttgcgaagctcaatttcaccatttgtcggccaccggcagtttggtctactttttgatattgtaaggggtggttcagaaggaatagccatgtattgaaaaattctttcaacggatatcattctattttccaaactacagagcactgcaatagcccacccttgtaacatattcagactcaatccataagtgactgcaagaccagctgtctctgtgaagtagtaaatatgagagttagcacggatgttaatacaataatgaactaatttgatctgactaatcaaattaaagcccaccgtacttacttgggtcaattagagcagctggcaaggtgaccagaagtatcaaggcaaatgcgaagataaaggatgaaagaatgtccaagcgaaagcacaaccattccattgaagcagcattatataaacttggtctagataaattatccatgaaatgactgacggcattgataaactgtatttccttgccaaagcatctaatgatatttgatccagctactgattcagcaaaatgctgcatcacaggagctctgcaaactccagtcaacctctgcaactctctagcaccatctatgtaatattgctgaagggaaggaattgtggtaattaaaaacaaacacaaaatatgagtcgtcttgaaaccaataatgtcatagaaaatgcataattatagttttgaaatatggtaacaattattattgttcaatagcatattttaagacaaaatttgattgttcagaagaacatcggaaatgtacaaggacactcctatatacactaggatcaacctgaaaatttgattgggaatatttttgccaagtaatgtatcacatcatatatttacttaatgattttattttgtattatctgtaattgctttgccatccctttaaattttaaattaaatctgtgaaaagaaaaacactgatgttcaattttcagttgaatctgtgaaaaattgtcaatatagtcatgaatcaatgtatttttccttctacatacttaaaaattataaactggaaccacaattggtatcgaacataagatatataataaaaagaatatctgataccacagagatgctgcaataattgggacaaaaattacgaagactggccatgctacccgtgacattaaaataattgttccaagaagttcgatagcaggaaatagaacatatcccatcaggtcaaaaattctggtgtccactgtgctttgatcactagaagcctgcaattttgtttcaactttcatgattaattgaatatgaataaaaattctaatggcattccaaggagataacttcaattttctcattaaaataaagatggtgaaggtaaattacttactctgttcaagattcgaccgctaggagtggagtcaaagaaatacattgaagctcggaatatgcatcgatgcatcttatcaaatagcatcattgcagtcttgcatccagccatgacaagaagatgggatcttatgaagatgaataacgagctcacaaaagctaacacaacatatacaagtaccattttcaagctattgaccggaggattcacatctttggatattggagcagcacaagccatccaaaaattgcttccaatttgaagaacttgaaaaattatctgagcgagcaaaataagcggcacaagtgctccaccatataccattgtaatatatttccaatagacggaaatcccaacccgccctttctccctctcttcttcttgtaccaactgaccattttgaacaatcccttcttctgctccttgattatcatccttttgcttatctgaaaagcgtacttccactgtcaccaggaataagactacttttgggattgccacttgagtgttctaaactttctagagtagaaatggcatccttatgggaaaatactaattttgtgaactcttctccagaattaagtattttagcgtaattcccaacttgtataatttgtccatctttcatgacctagaacagggaaatgaattgacatggtaaaacgattgttgcgagtagaataaataagtagatttgatagttgttggaagctcaccatgatagcattggctgatggcaaaaattcgacatggtgggtaacatacactacagtttttgaagctaagagtccaagcaagcactcctgaaaaatacaaggtcgtgatgaataactttcatacagtagatatactcttgaaccctaaatattgttcaagaacaagctacctaaaaactgtttagctgaaacatacaaaagatctgattaagacattaggtttatgtccacacaataaactatgcagtgagataaactgctattactgattttggaagttgggaaatgaaaaatccaacaaaaccaacatgttctattcaaacagcactagcactgacaactgaaggttaaaaaaaaccctaaattgactgggagaaaatgtcgttgaaatcatatgatgtaaaaatatattttgtagtattagaagtctcaagtaccaacaataagttattagtttaagcattcaatgatgattacacacatatagaaaaaggatttaaagatttgttctgaaaaataccttgaacaagtgcaacccagtatgagcatcaaccgcactgaagggatcatcaaacagaaagatatctgcatcttgatacaaagcacgtgcaatttgcatcctttgcttttgtccgccacttaggttaatgcctctctctcctataattgtctgatcacctaatggtaatatttccatgtcctttttaagacagcatgcttcaaggaccttttcatacctttccctatgcagttttgtgtcaaaaagtatgttatgttcaattgtcccactctgtatccatggcgattggctaacataggcaatcctaccacatgtttgaacatctcctgataaccttggtatctcaccgagtatgcatgacaacaaacttgattttccagatccaacagttccacagatagcaaccctcattccttgtcgaatacggaagttcaagtttcggagagtaggaacctcagaaggtgtgttccaagagaactgaccgttcctcacctcaatcgatacatcagttgtacctcttagaagtttagttacaacatcgctcgatagttcctcgaggtgcataaaagagcatatcctgtcaagtgatacttttgtctggatgatcacagagactgtgtctgggatactattgattggtccttgtagctgcctaaacgttgccagagcagacaatactttccctgtttctaatggaatgcctagaagcaaacaacttccaaaggtgaccatagcaacaaaagcaggagctccaaagaagacagatataagcataactgaggtgtatacatctttctttagccaatgcatctcctccttcctcaactccatgatcttcgacaagaccatttcccatccttgaagcttgagaatgcgcatgttccgcagcatctcagacatagccctcattctagcatccttggcatccatcattttctcttggtaattttgctggatcctccctataggtagatttgctaacattgtcaaaacagtggcagcaagggctgcaaatgctgccaaaccaagagtggagtataggatcagcattgctagaataatctgcacaggaaacagccaaagctcatgtatggaccaattgaaatccgcgacacgctcggcgtcaaggctcacggcattgatgatctctccacttgaactgctttctctggactgatttgagagggagaggcccttttggtaaatgacggcgacaagagctgagcgtacccgcacaccaagttgttgcgatctgaagagcaaatgccttgatgagaggccttcgatgaactgcgcaacaacaaaactcaacaccaaaatgtagccttctttagcggactgtggacttcgattcaggtagtcaacaaagtactcaatcaggtatggaccaacatatgaagagacagtacggagtaaggcacaaactgcagtgaagaggattaatttccaggttgtaagaacaagagctttgaccaagttaattgttgtaacatcggtgtacttccctgaaccagaaactgagacgagcttcgcctcaaagttagggaggatgccttgaacactgtcattatcatccaaagttggcacatcatcaagatctagtgctttcctccttccaagatcaagtaacggccccatccaagaaaaagtgataatactaaagaatccagcatctgtgaaagctgatctactgcttgtggccttagacgaggaagaagctgcacggtccaaaagtggctgatccatgaactcctgatcatagaacaacaaactttagaaagttacaactgattatttatgacgaagaaaaatataaaagtgttaaagtcaaaaagataatttcagtctgtccatggacgttaataggattacagaaagaataactaatttaaaggaaacaaacataactgtgagtgctaaagccatatgtaacatgcatgaaaaacatccggatgaatccgcacgataccacggagttccattgtcacccatggtaaagatgacatcacagatctccaagaaaacaaaatcgagacctagattacataaattgcatatgtaatacgtatgtaatttaatatgtgctaaacttcctcgaagtaaaaaaaaaagatgtaccgaactttttaatttagcaatggagatttttttaaaaaagtatccgatctcaccattctcagcattgaagcatggactaaatataaaaatagcaaaattagtgcaaacagactgaaaatgagaatatatgttaggcattactccttgcctatcctcaaaaagaaaaaaatatatatatgaaacaaaatactgcacgcatggggaataggatggtgtcagccacaaatcaaaaacgatgcgaaatttctgtaaattaatcagagactggctatagttggacagattctgttcattcttggctattccgtggcagagagggagaagagaagttggcgatctcgagcccaccggcgagcgtcggcgtcggcgtcggcggcgatcacggagaacctatcacataaatgccgcggtaagggtatcgagcctaccagtaggggctagcgcgacggtgccaaaccgaccgaagaggagccatgagccgccgccgccacagcctttctggtgtcggcgtagtttttctcagtgatgtccctctttttttttcttttttttttgagaagacgtatcgatagttggaaagaagacgcgactcactcacgtgataaagggagacggaaattacctatgctacacgtgcggtatgtggttttctcaaaatcttatgaaacacatcttgtttgtactccgtatgttgggtggcgagtttatcaacattttttttaaaaaaatatcctataataattatgaacaataaaaagctcttatagaaacttatttgcagtctgaagatcggttttcttcacatgctctacaaccgtagcattatcaatgtcatgcctaaaggttattttaaaattgagtaaatttggagtttattttaagagtctttttaccgtccagcgctcggtaccggtaccgggtggtaccaaattcctggccagatccaacggctcggtaccaattctatccttgtacaataccgacctgaaaactcagatggaagggcaaaaatgtaacttcgcaatgggaagcctagatcaaatggatcgggccgtgccgccccgccccgccgccgtctccctcttccgtgcctcacaccccccgccaccgttgtgcttccaccccgctgccgccgtgcttcctcacccccgccgctgccgtgcttctgccctgccaccgccgtcttcatcctctgacaccgcgacttcgatctgggtcgccaccgcctggatcgatgccatcaacgccgccgccacctggacatcaactccgccatcgccaggatcaaccaccgccgtctcctggactatcccgtcgggaacgacgacttcgacgccgccgccgccgccgggaacgacgactcgaacgccggttaaatttctctcccgacgctcatcttctctcccgatcctacccatcccgattcaacggttagatttgttttaccgcccggtacaacctgctggactgtagcaatcctcttattttaaagaaaacaataaaaatattagttaagttcaaattagtgtggatttcacgtatgtaacgcttatagcattatcataatccccgcatgttagtaacggtttctttcttccccttatcatctattttcctccatctcagtggcaacagctaaatctcttcaactaatgttcacttgctctcgtgctaggggtggggggcagcggctgcgtgagtcgcgcaggcagtcgccatgtctgatatagccgtcaagagagaaagctcacgcgatgagctagctgcttcgctagctaaatggagataaacaaaacatttaattcatgcatgcacaaccaaattaattggcatgatcaaaactaaccaccatccctgtagctatttgtgttgcctgtgctctagcgtgttagatagggagaaaaacataaatacatgcacattggatagtggagatatgtcaggcccaccaaatatgtcaggtatcacccgtatcagctacaagcgagcggtaagagcctcgtttctcacactatcgcccggcaacagatctagcgtccgttttttctctttcttcttttctccctcaaccacataggatttcgctgatgtgtaacaacgtatagcctgctgactcaaccttattatacctgctctaaaaagtgtaagtcgccctcctcctactacatcgtaattcgttgtaaagaaacgcacctcgacaaaaaaaaaacacatgttttccacccaaaactcatcccaccagtaaaaccagatggttaaaactcaaccctcgtaatttttccttctaatcccttggcaaagtaagggtatagcgctagtaaaatttaattaaaagttgagtaaagtaatatggactatttgttttgaaaaatgaaaacagattctcgaatcgggtgtacatggatgaatacaaggaaaagaacaagaggaccaatgtgaagaatcaaaatagagatgacaagtctgcaggcatatacttacctgctagcttcttcgttatgcctaaaagcctaacaaatcgatcagtacgatcggtcgctccccttctcaacgccggctgctatgcgctgtgccaaggccagccgtcttccacagggtttcatagcagaaggggttcatatgtactgcactcctgtatttatgtggggattttttttattacagtactagtacagatttgtttaggctaatccaatagaggtaataatcatatatatagaaggaaaccatctaattcgtgcccttcttatgtggagaattaatgccccttttatttgccacctacagcaacacaagagtatgattccttaattaatgaaatataatcgcacctgccatatattgaaatccaaatttacagccgtgggcctgtttggcaagtttagagaatactgcgagtttatataagggaaatagtagtgcggctgctgatagttttgatgggaaattaattaatggtaagattagaatttgatttttaagtctagcatgttttgtgatgaagaggatagaaagttttgatgggaaattaattaatagtaagactagaatttgacttttaagtcctagtgtagcatgtttggtaaatgggtgcaaagtgatggaaattactattccctccgtcatatgatataacaacctagtatcgaatgggacactttatagtataacgaatccgaacatgcttcctgtccagattcgctgtactatgaaatcccatccggtcggagggagtatcttcctagtttctcaataaaagtttagttagtccctttggatgcaagaatgaatatatatgtctagattcattaacatctatatgaatatgggcaatactagaaagttttataacgtgaaacggaggaagtagtttgcaacatcaatttctgcttaggtacagctgcatctaatttcttaaccctgttgttactatgggccatttgcattgctagttcagtatatactaccaaaatgcccatgcgttgcaccgggtaatgtcgtgttggataaagtttaactgagccatcttttaagcggtctagtatgacaataagagtgatcaagtaatcgttcataatttttcagcaattttaaaatggctccaaataataccaaagaaaatttctataaaagactaaataaattaaatcgacagaattaaataaaatcttattttggtctattactttcataaccagcccaaaaaattggaccggcccgttcagcgcaagcacacgagccaattgcacagcaagcgggccatcctactggcgatggcctgacgcagggcgaactgagcgcggcgaagggcgcacgacccagttctcttccatggcccaaggaccgcatggcccgatagcggtggcggccgacgcggggccgatctgacccgtccgatctgatggacggctcggattggtcccgtgccaatgaaatcgccggttggaggggagggtccgaaaaccctaaccctaatcgcctttctcccctactctccccgatccaatctccggcgacacgagaaagtggacggcggcgatccagtctttctctgcgtctctccctcctccacccgagttgtcgcagaccatatcgaccaccggctccaaggcgtcattcatactcgcgtggatccgccaccggcgcctggatcccgttgtctctcggcgatggccccatggcagctgcaatggccaaggcgcgtgggcagcgaccaaatttgtgggtggcggatctgccagccggggaggcttgaggtcgcggaggcgactgagttttggcggccgcctcacaaagttgccaccgccgcctgcttcctcgacatcgccgccagtgagagccgccgttgctgggaatcacctcccggtgtctttatcgattacctagctccctcaacaccccgacacccaagagcctcaccagtgagggccgccaccaggttagatccatgaaatctttttgtaattatggggttaatttcatctgttttttagtccagatcgaatatgcatctgtctttcgtattgaacttttatccgccctcccaatttttgttcagttttgcttgaatgggggaggactaggtagggactcttggacttacggacgaaaaagagaggtgacgaatggaaattacgaatttttagattttttttaaccgttatatagatatatgggatataagatctggtttttacggtttttatagaaaaacggcaccgaaccgacgtcaggtggcgtggccatgtggagctgagtggagcacgagatgaggaaaaaaatatatcgcacttctccagttctccttatcctcttgcacctccgtctccacctctccccctccctctactgcaagaattttcagaatatgctatcgaatacacactgctttcaggatatgccactcaattcggtctactttcagaatataccattagagcacgaatttttttcatttcgtgccactccgtctcttggagtcagtaacgtcgtcgtcggccgtccgcccggcaccgccgttgtcagtccgccactgcctgcgccggcgcccgcgttagccgcgccgtcgtcggtctgtcgctgccatcgtcatcaacaaccgcccgcacgcgcccatgtcagccgctttgtcgtacatccacccgccggcatcgtcgtcctcctccgccacagcttggcgagtgtgctcggggaggagcaccgtggttgggcccggagcgcaggtggtggacgcacgcgagcgcaggcggcggaccgacgatggcacaggcgagcgtgggcagacgaactggctaatggtgaacgacgacgacaacacagcggacaaggcggctgacggtgaacggacgacgtcatggctaacatgggcgcgggagcgggcggtggacgatgacgatggcggcgacgactggaaagaagatgagttgagagtaggggagccccacaccgtttcccccgctgctagacaccaccaccatcttgtcgccgccgccgctagatactaccaccatctcaccaccgcctcaagatttactcgatcatcgaggaccacggtggcaaggaggacggcgaggatggcatgatgtctccacagaggaggaggcgcgggggttagatccattgattttttttttcttcctttcctcccactttcacttgagcaccattgcttttgttcctccatcaatggcgagatggctagaaagaggatacatcagtgatgtctttgcctcggcagctagatttgattcggccgcaactggattttgccacattacgagctgctgcaagttaaggcaaaaattgttttttctgtgtgtgtgtgggggtgggggcggggggttgggatttgtttgtgtgtttgtgcttccacctttataatttttgtagcgtcgatcttatgtttggaataactaatgattgtccgattgggattttgattgatccttttgtgctttgtaagctgtaacggacagaggctgtcgctacatcggacatggcggatgaaaagttggggtgaccaacggaaaattgcagatttgcgcatttgcgcgtatgggatgggagcgacgcggtcgtgcatacggacgaaaattaggtgaagaaaggaaaattacgaatcttttaattagttaagataaagtaacacagtcggacgtccatggtagagtgaactgtgaaaaccagggtttcccaaaccgtcgggctcggggttaccgcgccccggcggtaagcacggtaaccgcggtaaccgcgaaaaaccgtgcaaaatttatcgaaaatttaaattattttttaaatttatttgaatttaaggaggttaccgcagtttttctatatcgtaccccgcggcaagaccggttaccgtggttactagcggtaatgtaaacccgggtgaaaaccaactaaaacagtggaaaaagaaatagagttgtttcaactttcaagaaaagaaaagaaatggaaaaatacacacaacaagggaaacacgatttaaaaggattggacttttcctcgcaaaaataaaagaagaaatcgattgggacttggggtttagaattatagcggtgatctctacgatcgatctgttgcattgccacctcgctcgcgcttttactttaatctgcggtgatctgtatgattaacacgtacgattctcaaactttcgtttcaagaaagaaaaggactcaaattcacattgggttttatgtatatatatatatatatatatataggtaaattaactggtgctacatggagtatgggtttcaaaattcaaattgagtatctacccaatttgaatgagtatgaattttttttaaatgtttagatatgatcaattaacttctttcaaactgaattttttttgttagattttgattctagttatataacatccaaacatataattcgttaggtatgtaataatgaattgtgaaataaagttgagtttgagttgttttgttgttaggtatttgtatgaatcaaattcatatacctagatatctacttacaatttgtaaatttttaaaaatttgagagaatttatgtgttttatatcttggagcccgggcactatggagtcccatatggatatatatatagttgtacaatctcggattaattaacttatccctccatcgatcgatcacatcgtgctgttttatctctccatcatccccaccatcgccaattcaattcaattcgacgtggccatgacgcagacgaatcaagccatcgaggtggacggcgatcggctgtcgccaccgccaccggcggcgtcacccgccgtgtccgccgtactcgagaacgatgacctcgtcggcgagatcctgctccgcctcgccttccccaccaccctcgtccgcgccgcgctcgcctgcagacgctggctccgcgtcgcctccgacccctccttcctccggcgattccgcgagctccacccgccccgcctcctgggcttctacgtcacgagcctcaagataccgcgggctcacccgctcttcgtcccgatgccgccgcctgcacggccaccggagctcgaccccgtcgtccttcgcggtggcaacttcagcctcgcttacgagggttacacgaccagtatctaccagtgcaggaacggtagcatcctcctcttcaaggagaggcatgatcggcgcgagctcaaatacgcggtgcacagaccgctgcagcatcctgagagaggcctactcgccatcccgttctcttcaacacatgacgatgacgatgacgtcgagcctgatctcggcttcgacgacgagaatgtgtgggggttccacttcggagaggatggcggcagccagctataccggttatcggtgatgttcaccccaaggggagctacttccgcgtggttctacgcattccgggacggcggatggcatgtccataccaaggcgacggcacagctacctggcttgccaccggaatcagctgggttcgtcgtggtccgagacaaggcctacttggcagccacttcgagcagcgttcttgtgttggacttgaagtcctcgagcttgtacaccatccagcttccagatggggtggagttcccacctgtgatgatgtggtataatgatcgaagccacgacgttttgttcggacgagcgagcgatgattctggggtttatatcgccgatctgaaggagcctcagcttcgtatttggctacttaagcatggcagcactggatggactctggttgataccatttgtttgcggtcgatgtgcgctaatttgcacataaattgtgtgggcggggatagtcgtgttgtttacatggattatgtaggggacgatgctgagtttttgttcttgaaaacagatgaatgtgcactctacttggatgttaagagtaggcaacttcacaaggtttacgaggtgacagaaaaggatgaaatcttgttttcaatcatgccctttatgatgatatggcctcccatattccctgtgaggaaggaaatatcataataatggtgaatcctcttgcaatgttctttcatgttattattatttgttccacaatgacacctgttagtgcttttgtacaatgacccctagtaaatttcagttttgctctatacatggtggtttaaagaggttgcacatatatatatatatatatatatatatatatatgcgactttttttatatactttagtggtggttctggagttccatgtataatgtatggttttgctttaggatgcggaaacttggaatacactaaaaacaaattttggtacatcaagatatattttttttgagatacttagtatctggaagtacaaaggcaatagaaaatatgatacccttgtacctttttaaggactagcaaaaatatttgtgcgttcaacagataaagataattttcatgattgataagaactctgccaatttaaacgataaaaccgaaataagacagacaaaacaatggaaataattcaataatcacatatagattgaactaggttgcgttcgcttcatgcgttatcgcacaaaggatcccttatatacaccattccatagcctcatagatccacgagtggatatgccataagttgatacatgggtatttcgctatatcttggaccaaatattgaaattttgattattcaattagtgaaagttttttttactgtagatagcagggggaggcctatccaccagtggagcatgagccaacaccaacgcccagaaaattccctacatgctgccaactgtgagggatgtcgcctcgtcatgtcgcgacagcatctcttgcaccatatgcatcggccacgatccgaacaggggacaccgccacaccggcagtgacaccgtgagttgcccccgccatggccaaccgtcgaagtgccatgaccatggcgacctccatcctaacgccgccgactcctccctccttcctcgtgcacagcagccacggccagatctgcaccgccatcggcaaccttccgaaactccgccatccgcgcacacagcgtgtgctaaatttgagcatttcattgcatgtgttgtagtggttcacttgcttagtgagatgtcacgaagtcccaggttcgaatctccccctcgacgtattttttgcctttatgatcatcgctcacgggaaatagcgcaaaaatttacaaaaaaaacatgggaaccgggtgatcaaaccacgtgtctacttgtggttttaaaaaaacggatgaccaacaccacttcggtacaagatggtttatgtacgataggaacatatactctcacttaacagatatatagggttagcgccatgattgctggcacagagccattggactgaggtgacggcttatttttgaaataagtttttgatatagttctcttttcaaatatgttttctaaaagcgttagattgtcaaaattatagcaaagaccattggtgtcatgtgacaccattgctataacactagctccacccccgagtcacaggtttatctatccagaagcggttgaactaaatagccaatatatagcagaagaatagtaggaagagctcatgtaaattattttcaaaatgaatgaacatttttcatcaatttgtacatgctgaagtttttttacagtatatatcagcgttagtaatgttaaggaacaataatgagatgttagggttagggtttatgcgccacccgggcgaccgggcggcggcagagctctcgcgcgtggcgagatgggtctggatggagatctcctctgatctgctcctgatgtctccgggggttttacccgccgtgggttgttctgggggggatttcctccctgtgttgaaacgtgatctggtagggtggcctgatcatactcgtataggagataagttgaaggctttccctttaggcggattgatctatgggaaaggttcgttctctgctttccgtattgttccaggggatctgtggcccttgcgaaattctagaagggggaggagattgaatctgttttggtatccgaagttcgagttgtattggagacctaattctgtggcattgcagtataaatacaagtcacagtggtggccgaaggtgcggttcaaagtttttccggcgatagggctaggcgttgtcaaccccgtctctttgtttgttggatctagcggaagtctcatggcggccaatgtcggtgggggtgataaagggatcgtcattgggacgatttcccacccgaagctgatgagcggtaatgagacggacgcggtgattctcgacaggattcctctgaagatgatcgagggagcagcgggcacatctgatcagggccaggaacacacaacggctgcgaggaggggatctgcagagaacaaccaagttgatgcaacacagtgtcctgcagtgttcactgaaggagatctggtggaggatgaggaggatgtggttgcggtgaatattgaggatgatgaactgcagactgctggcctgtggacgatcttggcgaggttctattctctgagaactccgaaccaagtggccctgtttgacgacatgcgcagagcttggaggttgagagcagatatgagctacaaatcactacgtgacaacatgttcatcataaccttctcggtagagggagactgattttgtcattaaagggggtccttggattcacagaggagatgcactcctggtagcgagttttgatggcattacgtgcccatcgaatgttcctttggatgttgttccgatctgggtgcgcatatatgacctccctctggtgttgatgacaaaggtaagaggtgggatgtttgggagcaaactcggcaaagttcgtgaggtagacgtgagggatgatggacgcaacaaacatgacttcttccgcattattcgtgttgatctccctgtcaagcgtcctctgaaatcacagatagctataaggatgactgtccaaggcaaggaggtccttcgcaggttcgatttacgttatgagcgggtaccgcacttttgctttatctgtggttttattggtcattccgacagagattgcaatagaagatctgccaatgaggatcaacctttccaattctcagctgagctacgatgctcccccccttaaaccttttgagaagaagatcagtaaagtgaaagctgcccaaacatcaagtgttgcacgtaacttgttcttcagaggggcaggaagtgctagttcatcgtcctccagacacaaacaagatggtcagatgcaggaagcaataccgcccagagttgatgcccatgatgggtttgagtttaaggaaagggaaggggacactgcaattgatgagatgttagctcaacaggctgggaagatggatgttacgggggacaaaactcaggaaacatcgatggttgtccctgctgggaagctagcccagcaacaataggagaaggaagcacccaagaagactgatggtgatgaaatttctgcttctgagatgataccagccatgaggaaccttcaacagcaagcctcgtttggggaagtgtcatccgaggagatcagcgatgccaataggaagaggatgccagaccagtcaggactccagataaaagggagggttcagcaagcattgttggaataccaacaatacacaggtggcagcaattccatgcatggggatatcggcaaggcagctagagcagtgaagagactcaagaaggctgcagagggtgaggacacagacgatatggaggcaaccagccatggggccgctggtaaactgacgggacctgtgattgggtcccgtcaggagcaatgagttgcttggcttggaactgtcgcggtatagggaacgcggcgacagttcgtgacctttgtgccttagtgaaggaggcaggttcccatattgtgtttttaagtgagactaggcaaaagattgagaaggttcgtaggctgcggaatagattgggtttgaagggttttgctggggttaacagtgatgggatgagtgggggtctggctttattctggcatgagtctgttcatgtggaaattataagtatgaatgagagatatattgacgcgtatgttcgtttatctgtgaatgctcctgtctggcatgctacttttgtgtacggggaacctagagtggaaaatagacatcgtatgtgggcgttgttaaattcagttaagcaagtttcggatcccccgtggttagtggtgggtgattttaatgagactctttggcagtttgagcacttctctctgaaacaacgaagtgagctgcaaatgcaagcctttagggatgtggtccagagatgtgatctccatgatctggggttctcgggggtgccatacacttatgataataggagagaaggccgcagcaatgttaaagtgcgcctagactacgcccttgcagatgatgggtggaggggactgttctctacagcacaggtgtttcatctgtcctctcctagatcagaccattgccccatccttgtcaaattttcttctgaagaccttcacaggaatcctgtgaagtgtgtccattatgaaatttactgggaaagagaccctgcaatctctgaagttatagcagaatcttggggcgtttccggagttaagcaggatctgcgcgacattaatcaagctctgtttaggatgatgtctgatcttcgcacatggagtaagaaaaagttcaggaatgtcagccgggagattgagaaaaatagaaagaaactatctgaacttcttctaagtaatgccgacaatagggaaataagacgggtgtccgatcaaatgaatgaacttctgtaccgtgaggagatgatatggctgcaacgatctcgaattgcttggctgaaagaaggtgatagaaatacacgtttctttcacagcaaagcagtgtggagagctaagaagaataagattacaaagctacgggatagtgacggtactgttcacagtacgacaaaagagttggaacgtatggcaactgagtatttccaaaggctgttcactgccgaccccagtattgatcattcgtgagtcactagcctgatgaagccgaaagtcacagatgcgatgaatgagaaactatgcaaaacctttagtgaagaggaaattgcaaatgccctgttccaaattggtccgttaaaagctcccgggccagatggattccccggtcggttctatcagaggaattgggctatactaaaggacgacattgtgcgagctgtacaagaatttttctcttcgggtaccatgccttcgggggtcaatgagactgccattgttctgatactgaaaactgagcaaccataggaactaaaggatttcagacctatcagtttgtgcaatgtggtctataaaatagtgtctaagtgtttggtgaacagactaagaccaatcctggatgatctggtgtcacagaaccagagtgcctttgtccctggtagattgataacagataatgccctgatagcattcgaatgcttccaccatatacagaggaataaaaatcctgagaatgcttactgcgcatacaagttggacttgtccaaagcgtatgaccgtgtagactggaaatttttggagtaagcaatggttaaactgggtttcgctcactgttgggttaaatggattatggcatgtataacctcggtgagatatgcagttaaacttaatggaaccctgttgaacacctttgctccatcacgaggtctgcgtcagggtgatcctctttcgcccttcctattcctttttgtggctgatggactgtccttgttactagaagagaaagtggatcagggagctatgaacccaattcagatatgccggcgtgctcctgctgtgtcgcatttactgtttgcggatgacacgctgttgttctttaaagcggcaaatgatcaggcggtagtgatgaaagaagttctcgaaacttatgcttcctgcactgggcaattgataaatccttgcaaatgctccatcatgttcgggcaaagctctcctactgctgtccaaaatcagataaagcagaccctgcagataagtaactcctttgaagataaatatttgggctttccgatgcctgagggtagaatgaccaaaggaaaattccaaagcctccaggagagattatggaagagaattatgctgtggggggagaaacttctgtcaactggggggaaggagattttgattaaagcggtcctacaggccatgcctgtttatgttatgggactcttcaagctcccggagtcggtctacgaggaattgacaaaactggttcgtaatttctggtggggagcagagaaagggaagaggagaacgcactggaaatcctgggactgtttgattgctcggaagttgaagggaggtatggggtttagggatttcaggctgtttaatcaggcacttctagctagacaagcctggagattgttggacagaccagacagtctctgtgctagaattttgaaggccaaatactacccgaacggttctctcattgatacaagttttggaggtaatgcctctccaggctggagagcgatcgaatatggtttagaattactgaagaagggcatcatatggcgcattggcaacggtaaatcagtcagattgtggagggatccctggattccgcggagcttttcaagaagacccatctcagctaaaagaaattgcagactgagatgggtttcagacctgattgatcagtccgagtcctgggatactgacaaaatctcgcagcatttcctgcccatggacgcagaggccatcctaaacattcgtttatcttcaaggctggaggatgacttcattgcttggcatccggatagactggggagattttctgtcagaagtgcttatcatctggcaatagctctggcacaggttgatgaaggctcgagttcgtccgggaatggaaatagcagagcctggaatgccctttggaaatgcaatgcgccccaaaaggtgaagatttttgcctggcgagctattactaacagccttccaacattggaaaataagaagaagaggaagcttgaagtttcagacatctgcaccatttgtggggtggagtcagaatatgttgttcacgctttgtttcgctgcccacatgcccggcaattctgggaagcgatgactgttgatatgaagcttaaccctctcagcaacattcgcaatggagatccgaaagtgatcttggacctattggagcagtcgcagccggaggaacaggttatgcttttaatggtactgtggcgaatctggcacacacggaatgaaatagtgcatggcaaaccagccccaggaatactagtgtccaaacgtttcattgaaagctatgtcctctcccttgctgagatcaagcaacacccccaagcaagtcctgagaaggggaaacatgttgtggatgtggttctaaagaagtcgcacaacatcaaacggagtcaagaacctgttcctgacaaatggtcgaagccgctcctaggaagcatgaagctgaatgttgatggctcattccaggagagtgacggcaagggtggtataggcgctgtgttgcgcaactgcacaggagaggttatttttgctgcttgtggacatgttgatcgctgtagcagtgctttggaaacggaactccttgcctgcagggatagtcttgccctcgccctacaatggaccctgctgccaatagtgattgagacagactgcttggcgatgatccatcttttccgcgatgcaacaggtgctaaatcggagctggcgtttttaatcagggagatagattctctcttggtgggaaatagggatattagcttcagtaagtgtcttagaagtcaaaataatattagtcactatttagcaaataagggccgttgtgacaagatcacacagttttggccggacaataagtgtacttttatctcgcagtttatctgtgaggaggctaatgagtaattatccctttcccctgaaaaaaaaaggaacaataatgagatgtataggttatcagggcaaaaacaaagggattagtgcatatgcatatgcagagagagtaggaaactcacaaactttgcacctctctttgccgagatgacacatgcttttcatggctcctatgctataaaagggcagcatatacagtcatacagactagtattaattagttactaagcagattagaattagttttggatcatcactgcaaattgaaggatcacacaaatcaatggctgagttgcattgtcgtttttgtgttttttggcattctgtaacttgaccgccccttgcatatatatgcagccagctgaaattagccttggctggcatcctcaagttagagaatgccaaaaacacaaaggcggccgggatgctgtgtcttgccggaaggcacgaagctgacgctggcgcacgacgaccacggcgtggctgcagcggcgccaaggttcatcatctacaaggacaaggccgacgccgtgccgtccaacctccgcgccatggacgccatcctcgccatgttcggcatcctccctggatccgacaaggcggcgcaggtcgccgacaccctccgcacctgcggcgaactgacggccgccggcggcgaggagccacgccacctcccgcgaggcggtgctcgacttcgccgcctcggcgctgggcaccagcgcgccgcgcgcggtcaccacgctcgtgcacgggagggagccccgcaggtacgtggtagcggccgacggcgtcgcccggatcggcggcgacgccgtggtggcgtgccaccctatgccatatccatacgaggtgtactactgccaccggccagccgacgcggtggcgctgagggtcgacctccacgccgtcgccggcgtgggcctgggcggcgccactgccgtcgacgtgtgccacgtcaacaccaccacctgggacagtgcctacttcgagctcctcaaggcaagccgtggcgacgccatctgccactacatgccgcagggctatgttctgtggctagccaattgagacgatattagtatttcctacaaacacctgatcgtagctactcaaccttccatgattgatgcttgatgcatctctcgctactacttcatccgtttcacaatgtaaatcattctagtatttcccacattcatattgatgtagaatgacatacattgtgaaacagagggagtatcttaataaacgcaaaatctatttcgagaggcatctcgatttagacttaacgagcgacgtggacaattacgtgagaagtattagtagcattacagacatgcatgtaagcagtttttctattaggttgtgcatattttttcttcttataaaattttcacttaaattacttatccgatctataatccgattacaccattgtgttcgttgcaattaaatctttataacaagatcttacatgataatattatgataaaaaaaacatttatgttataaattacttttataatatatgtaagttacttttatcttatatacaaattacttttagatttgattaaattacttctcataatttcataatgctttgagttgattacttttattattattgtttttactcagtttcataatttgtgttgattaaatttaatttctaaatagacttatatttttattcctacgacgaatttacttctaatatcataacaacttactttcattttatactaagttacttttatgatttttgtaaattactttcaggctttattaaatttactttcataaatgtatttacatgaaaatcttctctacacttttgaatttactccacatagtttcttattggaactcactcataatgtaattacttctatatagagttacttctattacatagctaagttacttttacaatttaaataaattacttttaaattaataaaatattttaatatattcaatctggatctcgttttatcacatattttaagtggagtacaatgatacaaatagatcttaaaaataatatatgatttaaaagatacaagtgattaaagaggtaaaaaaacatgcactatagtactttttaagctaaaataagatttaaatctaggatggagtgatcgctgctttaggcaaaccagagaccggtcgttgtgtagtcatgaaataaaactgatgctgtgctctctgctcgtcctcgactcctttttccttttttctttttttttatcgaagaacagtgaaggaagctatactaattactgttgcaatcccatgcctgttgctaacttctgaggaaggatgaagatgtcagagtccaaaaagaatcggtagactgaaattccaagttttcaggaaatttgaacccaaaaaagttgaaaatcgaatacatttttactaattgtcaacaaattagtaaaactgttacactgttcattcatcacctgtgttcgaccgtccgatctgcctatccaccaagctgttcatgtgcagatggactactcgagtagtgtggagatgacgaggacggcgccagagcctctcgctgcagctgatttggggatttccatttcctttattactgtgggggatttacagattttcattggctctgctcgctgctaatttgggcagtacaaattttgtgcagccttccaccgatttcgagcatccagtatgcatgccaaaaagggtttcccaaaccgtcagggccagggttaccgcgccgtgaaaaaccgtgtaaaatttatcaaaatttaaattattttttaaatttatttgaatttaaaaagattactgcagtttttctattaccgtaccccgcggtaaggccggtaaccgcgcggttaccgaaagaagataaacatgctattttatctctaacacgcccccgcagactgaacgtcgttcgaacaaacgtttaggctggaccgaaactctgtgaagactggagttggaagacccttggtgaagatgtcagcataatgtgtgagcacattaagagcgcgaacggaaccaatggcgaccttctcacgaacaaagtgtagatcaatctcaacatgtttcgtgcgctggcgttgcaccgggttagtcaagagataaactatgctgacattgtcacagtagaccagagtagccttgactggaggagcatgaagctcatggagaagctggcgcaaccaacatgtctcggcaacagcgttggcaacaactctatactcagcctctgcactcgaacaggaaaccatagtctggtgcttggaggaccaagaaacaagattatctcccaaaaacacagcatatcccgaggtgaacttgcgagtgtcaggacaactggcccagtcggtgtcagagtagacaaccaaatcatgtgaggctgagtgacgaatgtggagaccaagatccagggtgcctcgaacatagcgaagaatccgcttgagagctatgagatgagactctcgaggatcatgcatgtggaggcaaatctgctgaacagcatactgaataccaggccgagttgctacacggtttgcagtcgaacatacctacacgctccaatatctccaagccatactgccgttgagtgagaaacaagccgaaggaatggcgagagactgaaacaccgagaaagtgatggagctcaccaaggtccttcatactgaactcagactgaagagaagagattgtccagtgaagcagcgatgtcgacgaagcagtgagaacaatgtcatcaacatataataagaggtaggccacatcacctccacgtcgacaaataaatagagaagtatatgccttggcttcaacaaacccaacggagcggagaaaagtggcgaaccgactgtaccaggcgcaaggagcttgcttaagcccatacaaagacttgttcaggcgacaaacagagttgggctgagcaggatcaacaaacccagatggctgcatgcataacactgtctctgcgagggtgccatggagaaaagcattcttcacatcgagctgatggataggccagttacgagagactgccaagctaagcactgtgcagactgtagctggcttgatgatggggctaaaggtctcgtcgaagacgatgccggggcactgagagaagcagcagaggacccaccgcgccttgtagcggtccaaactcccatcggcgaggaacttgtgacgaaagatccacttgccggtggcgatgtttgtgcccggtggaagaggcacaaggtcccaagtgcaatttgacatcggtgccgagtactcctcttgcatggcatcacgccagttggtgtcggcgagcgcagcatggtaggtgcgaggtatcagggagagagtggcggcatggaggttcaggcgtgaagtggcaacccggacgccagccttgccccttgtcaccatggcgtggttgttgtcgatgggagagatgccgaagcctgtaaccggtggccatgtaactagggcgcgggcgcttctggcgcacgtcggtaccgcgagtggcgacggctagagaagcggggcacgcagcaagcgcgtactggacgcgccgtcatgagctggggaaggtgcgccgtcatgagccagggaggaagcgccgtcgtggacatgaggagcgccgtcatgggccaagatggcatcatcgtgggcagaccgagccggagaagctggccctaaagtagagaccccatgggccgtcggagatgaggccgcaggtgccggcccaggagagaggcgcccagcccagcccggcaagcagggaggggtcggccgatcgatgcatgcgccggtgggcccaagagaagtggaggcagccttccccgagcgattggagccaattggagcctgtataggagaagtaaaatcctccaggaaagcaagatcagtagcacaagcagtgtcaccagtcatttcggcaaagggatatgtatcctcatcaaacaccacatgccgagagataataaccatgttggtgatcggatcgaaacaccggtatctcttacgttcgctagggtatccaagaacacacacttggtggaatgtggcgagagtttgtggggtgcggtggcggataggttggggtaacgacaaccaaagacgcaaagatgtgtgtatgaggggtggacaccgtgaagggcgaagtagggagtgtgttgggctaaagttttggttgggtgagactcaacccataatgagccggggaggtgagcctgaaatagaagcgagcgtacaatgttattaagagaacgatgagtacgctcagctttacccttttggggcgaggtgtgtgggcaggaaatgcgcatggcgacgccgttggtgaggaagaaagatcgagcggcggagttatcaaactcgtgaccattgtcgcattggatgttgcgaatgggtgtagcaaactgtgtcctgacataggcaaaaaaaatgcgaaagagtggtgaatgtgtcggatttcaaacgaagaggaaatgtccaaacataatgagagcaatcatcaagaatgacaaggtagtatttaaaaccagacacactgagaactggagaggtccacaaatcacaatgaattaactcaaaattggccttagccctagacaaagaagtagcaaaagataggcgtatgtggcgaccgagctgacacgcatggcatacggtggaggagccgcatttgggaggagagatgaccaaggagtgagcaaaacgggtgagggcgtcgtgaccaatgtgtccaagccggcgatgccagagtgtggtggtagtggcagcgaaggaactggcaatggaggtgaagaagttcgccagaaaggagtacaagtcaccgaagctattgcacctggcgatcacggtcctggtaagtagatccttcatagtgaaaccaaacttgtcaaactcaatggagagattgttgtcagtgacaaaccgacaaacagagattaggtttttgataatgttaggtgaaacaagactgttattgagaacaaacattctattagcgtgaagaaatgaagcattgccagactgctagtagcaatgatgggcaaaagagaactgttgccgacgataatgtgggacagagtggcgtaggtaggttgggtgagaggataggataccggtgtccgatgtcatgtgtgaggtggcaccggtgtccatgtaccagccgttggaggcaggcgtcgtgagggtgtcggtttgaaacagacttgccaaagtctgttggtcccaagcaagtgttgggctggaggctccgtaccaggacgttggttgggccgatggctgcagttgttgttgctgctgagtgaggccggctggaaggtaagggccggcctgggagaccggctgcgggagggcagcttgcccaccggacattgccacgcccgcaaaaggagaagtgggccgagggcccaaaatccctggagcacgcagcatcgggccgcccagccacatttgaatcgtgccgacccaggggtgctgaggagtgggccaggcctgtccagcgcgaggctgaggggcagcctgccctacgctttggccacatgtgccctgagcggcgccgccattgccgccggcggtgccgcccccgttcccgttgcgtcgacagcgatttttgttgttgccgccgccaccttgtgtgttgccgccgccttgatttaggttcccgaaccccgtggcgtgcaattcatgagggcggtggaggagttggtggagcggttggaggggcccttgttgatctcggtgagaattagcttactcgatccgggcttcgacgaacatcgggaagggacactgcagaggaataatagtttggagaatttcatatttagggtttaaaccaccgatcattgcaaggacaagttgctggtcggtgacggggtcgccgagctcaccgcgagtgtcagccatagccttgagacgtcaacagtagtcgttcacgccgaggtcaccttggacgaacgtgtgaaattcagccgtgaggttgatggcgcgctgttcctagtggccgaggaacatctgctcgagggagagacagacgaggcgtgcgttaccatcaggctgaatgatggtctccaggaggtcggtggcgatggtcccatagagccacgagagcacgacacaatccgtccgagcccaggacgcatgatgaggaaaagcgtcgtcagagaggacgtggtcggtgagggcatatttggtaatttgcggcgccaaggtcgaggacgacggggacaagcaccttgacattgagaacagacaccgcctgggcatgaagggcatcgacagtgtcagaggttggcagagcgcccccggacatggagccggcgggctgttcgtgctagggtgtggctgatcggcgaccaaccgcgcgggcctgcacccgtgcggtcagtcctgcctgccttagtccattagtacaacaactactgctacaatactactactactactaatactactaccactagtacattattactactacttgtaatactagtactattataattgtttatatatatatatatatatatatatatatatatatatatatacacgtatacaaagtttatatatgatgtatacaaaatttatatacacgtatacaaactttgtatacgtgtatttttggtttttatatacatgtatgtataaaaataaaaaaatacacacatatatataaactttgtatacgcgtatacaaacgttgtatatgcatatacaaaagttttgggtttttatttacatgtatgtataaaaataaaaaatacacatatataaactttgtatacgcgtatacaaagtttgtatatacccgtatacaaactttgtatagaagtatacaaagtttgtatagacgtatacaaagtttgtatagacgtatacaaagtctgtatacgtataaaacgaaaataactgaaaaagatacgaaaagaaaaaaacagaaaaaaccaaaaaaaggaaagaaaaaaacagaaaaaagaaaaaaagaaaccgtccaccagaaaaaaaaaatttccacgcgccgtcctccaccctcctccccgcgcgcgacacgcgtccagtcgcgcgggggagggggcgcgcgactgaacgctaattagcgttctcgttcgtgctgtggtggttgaaggctgagtgcagcgaacaggctagcgtggtcggccggtgaagaagagccgaggccgatgggcggttgcgtggtcgcgctggctggaggaagtccgagggtggcgcgaagagccgcggcgtcaacggtgaccgttgtcgggaaggtagaacttgacgctgtggccaccgtgtcgttgataggcgtgatgacgagagcagaaatcaccgcttggacggccttggcagtcgcggccgaagtcgcgtcgatgagagccgtggcggcggcacggtcgtcaggtgaggccgagtcgtcgggccgaaggacctgccggatggcagaggtggcggcgtcggtgatggaggcgaccgccgcggtaagagccgtgtcgtcgacggactacatgggcgccggcaggagagagagccgtcggcgatgaggttttagggtttagcggaagcgattggatcgggagtatctgataccatgaaagcagggatagctcaacgcgatatcgattaatcacggaacatgtgtacatatatagctacatccataccagaatctctcaaccgatgtataacagaatcgggaagattggataggagatcggcaaaagcagaaagaagataaacatgctattttatctttaacatatttgatttacaagacttgtcaggggcctaggaatgccttcagttttcgactttttacaagataatagtgggtaaaatgagaatatgcttgcaattagtacttgcctcataatgtaattagtaaaacaaaatggcaaaatttgctacaagacacacaaaaaatatgtaattagctcaccccaccgccccgctcgcgccgacctcgccgacctcaccctcaccgcgcgcgttcccggcgaaggagaaaacgaagaaagagaagtggcaatccgggtatttaggaaaatatctcatctcttttgacccagaaataataaaataatacgaccagtgtcctaaaaccaattacacaatttttgtagtgtccatcagccatatcacgttttcgcggtgtctcccagctaatcccagctaattacatgttttttacgtgtcctgtagcaaattttgccaaacaaaattacccaaatggtggactgattctcgtacttataatggtagaatttcctttcagtgcagttattggtcttcagattgagcaaaattattgttctctctgtcttgatcttcagtttgagccaaaattacggttttctctataagtcatattttgcttatcgaggacattgttaaatgtgccatggcattttagcatctgatacatgggcttctgatatatacacatgctgtgctagccattacctctaaccatatcatgttatttaatttatagcacatgattgaaaatgtattttaacatgaatgactcgtaacgatttagaatttttctaatttatatttaataaaccatggcaaaataatatggtattttaaattttcatttatttagttgcattgcttgagaatgagtttgagtggtttggttggattgtctaagtgcaaatgctgctgtcatttgtggaaattggaaagattgttctttggtgggggttcaacgtcactctttgcaacagaactaaaagcatgcataaccaggaggatatatagcagttaatcacataattttcttattattttgtttgttgctctttcatgtcagatacaacatgtgttcctgacgtttcttacacttctttgtgcagatttctcatcagggggatatgttctaagctcaaaactgaacatttctatatcgctaatatatagattatgtattttgaacactgcaaagtgttattagtaaacctacaaaattacaagattaattaaaattgacttcatttattagatacaatattaacaaaataggtaagaaaaaataaaaactgaagatcaatgtttttagccatttgttaattacttaatttcatgactccaaaacgaagtttagtttggtcttacaattttatatggttatctaaattctcacttatatgtgtgcgttttaaaagcttttgagtattttttgcaatagttttcaagtttatagatgttttcatgtaaacccttgtcactagctagagtcaggcattcattactccatcataccctggttctttcccagcggcggtgctaattcaatcccaccaatataccgaaaacacaacacacctatgccctctcctttctcgtagcaaaaagtattggcagttcgcacttggtatatctttacctattactagtaataatgcccgtgcaaggcacgtttttccaatgtatatttaaaaaagtaaaagtatgggaagaaacagtgcttgcaagggcatatttatacattgacttcaaaaaaaatggcaatggtatgtccacacattgaattcagatacattccatgtagttctaaaaaaaagatactccctctgtttaataatgtaggtcattctagcgtttcccatattcatatggatgttagtgaatctagacatacatatatgcctagattcactaacatccatataaacatgggaaatgctagaatgacctacattatgaaacggagggagtacattccatgttcaaccttaaatgataataggagtatattgtttacacatattgcaatggctaaggtcagacactaaacccacacaaaccttacattgtctggagaatttctaaacttccggtacttgagctatgagaaattcataactttaattagctcacagcaaattaaaacattgaacaatatttagatgcttgtcgaagttcagattctaaattcagatgctcctacatcataaggacaagtcagaaactaatatgccaaatgctcagaaaataatatatgaaatgttcaatcactaatctggcaaatgttagacatctatggttcacacatattgcaaggacaaagactccaaatatagaaaatgaatagcatgtttgaggtatatataaagaatttgtcatcagcatgacagaaaattacagcatttttttttgtttttttggaggacacaacatgagatgtgattggaaatttttttgctcctaggaaatttgtaacaaaaaaaaggaaagtgttccacatttctaaaggctgtcaggaattattaactcagtacataaccaatagttcacagggaagaatagaaacaatacattaattacactacacaggatgccatataatgcaaggacaatttcagaatgttgtcaaccaagttcttgagcaatgcaagcccaagttcagaccatgtaaaactaaattcaaattcacatataaagttgtatggcacacaaagactataaagcctcctaattttggttggagcaacagcaaacatggttgggtagagttcagcgaatataaattcaataggaacttaacagtagattataaggaaaatgacatgtaactctttgaattgagattgagcagagagaaccatcagcatacataagtaaaatgcaaatttcagataattcacaaatagtcaatagtgttgtggtatgcatgtggcaaacaagaacattcaggtagataattttgggatttcatatgtgtacaagcatatgaatgtcaaatattattctgacagggaattatgtgtaagtaatggcgtccttcaaacctgcaatcgtgattaacttgctccacttaagtcatgtgcatcaccttccctgatgccatcctccaaatctacaaccccgattaactcgcttcattgaagtcatgtgcatcacattgcctaattccatcctccaagcatgtggtcagagatgccaccaggcttatatgaaggttgcctcctctcacaaagaaggaaaaaaggaccgcctcttagcagcatgtgacaatggctaggataatcccggatcaatgccaatataaagatgaaattatgcatgttgtagcagtgctagacttctggagcatcatggaatgtgttttggtcgtgtgcccctgggtagaggttggggctatagcacatacttgtgcctcaaaataaaatatcttatttttctttaataaaagttcatctgtttggagaatatatttgtccttggatctacccaaaacaaaatttgaagcgttaggacaaaatcaccaaaattttatcaattcaccggcagctgctagctaggagcacataaggcttgttaatgaaaaagtaaacactcaaattcctagcccagaaaaaggaagaagttattcctattcagaatcagagttgttccatgcccccttgcatacactaagctgagtttctttaatatgtttatactacgcaaatatatgtatgtaccttatctgaccagtgaccaataaccatagtaaaaattagtaaaaacttaaagcaaagaaataatcctgcatatatgaatattacctttttgttgtgcctatggagtatattaattcatatatatcaaccaaatgccaatcaatgataaataacagaacaaaatctccttgacccttctcatagagcatcttaaagccaaaagccatcatctgacaagggcctataaaaaatgccttccatcctgttcacccatccccagcatatccgtataagcttgtattacgacaattttatagtatccctagctaaagaaatcaaatggtggaatgcagtatcacttgaacaattctcaaacctgtacaatataatttctctataaagtaatctggaagagacgcagcatggcaactacaagtctacaatgttagtctgaatggagcaacaccagtcaccttgataggatatagcctgcaatgatgcacatatggattgataagaaccgaatcacaccattaagaggagagatttaatatatgtgcatacccttcagctgaataagaatccacacagaagactaatggggattcagaagagtcaatttgagtcaatggggtctcactcgatctcaccagcagaagaaattttgacgcacggctggaagtacctacggcagactatgcccctcgtaacggcggcaagaccggaggcgcgacggaaagctggaccaccggagaacgacggagcagtggcgctggcggaaggctggaccaccggtcggcgacggggctgtggcgccaacggaaccctggaccagcaggtccaattgtggtggcgagcggcacggaggcggggcggtggagggagtcaccggcgtcgtcggcgaagacgggagcggcatcggtgacgacaggagcagcggaagcggcgacaggaggcaggagccgatgcggcagcggtggatggaggcaccgcgcggaaggggaagaggcggcgacgagagtattttacctccatgccattaagaaagttgaaggttacctatatgccaaaaaaaaattttgagtcacctatataccatgacacaaactttcgtttacctatctgccattccatccatcttttgttagataataagctctgacatgtgggacccacgtatgaaaatgactaaattgcccctgaagcattttcatctctgctcctctcccgagcaatttcaccctagcctagccgccgcctttatagccgccgccggtcgtcgccggcgccggcacgccgccgccgctgcctcgcctcgtctcgcgtcacctcgccagatccggcggcgcgcctaggccggctcccccaggccggctcggtgccgcaggagtacctcggcaactgcctccgcccttgcttgacatggccggcctgctcggcgccggcggcgtggtgacggcggcggcgggcatcggcgccgccatcagggggctcgacaacggcgttctggacggtgccgatgggtggttccagaagatcgtgtcgctgatgccgcaccggccgatgtccatcgccggctcgcgcggtacgccgtgtacgacaccgacttcgggctgggccggccgatgaaggtggagctcctgtccatcgacaagacgcccggcacggtgtccatggcggaggcgcgcgacggcagggtcggcatctagatcggcgtggcgctgccggagtccgacatggcgcggttcagctcatgcttcgccgacggactgaagcagctgtgaggacgaacagcttgttgcatttattgctttcttgctgctacatattgttgcagagttcagagtttgttcagtttgggtgtgattctgtaatgctagctgttgcttgaatgttgatcctataaccaagtattatttctgctttttctttttttttttgcattttcttacttatgcacgcattttttttccttatctttttacgaattttccttattttttcatatgttcatatttatttatgattttttaaaatttatttacgaatttttttcttatttattcccagttttctatttatttccataattttaaaattatttactaatttttccatatttatttcttgttttaactttattttcaattttttagaatgtttactttatttcattttccttcaacctacatttcagcctttatgcggtgtgtgagccgatttctctttcaaatgttcaatgtttcattcaaagtggctgaaatagagcaagggcaaaataaacctttaaacctccattagtctccgttagtgctgattccatccaaagtggcgcataggtaaacgaaagtttgtgtcatagtatacaggtgactcaaaacttttttgtggcacacacgtaacctctaactttcttaatggcacaggggtaaaagactccggcgatgaaggcggagaaaattgtgtggtggaggttggagaaaaaggacagcatgccactccatatggtgggtttcgacaaaatgccacccaatatattgcaaaggataaaatgccactcaataggttatctttaggatattttaccactttgaggaggtttaagacaaatatgcccctactttggagagagagagaggaagggagagagagccggagagaggagtcgaacggcagcggccgtggtcgtcggcggcgggcagcgacgagggaagaacgagcaccgtccgtgctcccgctagcagcgacgaggagagaaagaagacgccgataagcgcacaggggtggcaccggagggggtgagcgcatgcgcgggcagcgctgcagagccctccacgtcatcgtcgtcgcctcctcctccctcccgtcggcgttgcccttctccccgatcgccgccgccgtcttcctcccaatgaccacggccacaggcagcgacgagggaagaacaagcaccatctgtgctcccgctagcggcgacgaggagaggaagaagacgccggtaagcgcgcgggggtggcaccggagggggtgagcgtacgcgcgggcagcgctggagaaccctccgcgtcatcgtcgtcgcctcctcctccctcccatcggcgttgccctcctcccccatcatcgccgccatcttcctcccccatcacagtcgtcgtcttcctccctctccgccgccgtcttcctccccctgtccacctgtcgcagcccacccccgtgcgctcgccacccgccgccggcgagcattagcgtcgtccgggtcaaccttccgctcctccctcttcctctctatccacggccaggggtattttggtcttaaaatctctcaaagtggcaaaatatcctaaaagtaacctattgagtggtattttatcctttacaatgtattggatagcattttatctaaacccaccgaatggagtggcatattgtactttttctcgtggaggttgggaggaaatcatgcgattttgtttatgtattcgagtcatggtatccacagtgtgggcaaggcgatggtgggaggtgggacagattttgtttctgtatccgagtcatggtatccccagtgtgggcaaggcgatggtgggaggtgggaccgtgggagggccgtgggacgctggggatggagtatagttgatttggcctataggatcggagtggtgaactcctggattggagtggtgaactccttctttttatattagtatagataaaaattcaaggtgtttttgccgaaaaatttcataagtcacccccaaatggaaatagcgctagggttttttttcgcatggtctttttttcaacttcccaatggcgcacggttttttttactccgcctccagatcgctcccaatattttttctcagatcgatcgcatccgtagcacccaaattttatgtccgattcccaccccgatagctccctcccaaatatatacctaacctaattaaaaaaatttcgtccgcaacatcataagtccaacaaacaacaaatcatccagagtgcgcatcaaataacacacaaagttttaatccagtttatgttagatcccaaatataagaatagaagaacagcaaacggagataaaaaaaacaaatcgaacagaaatcgagcagatttttccatagccgcctctgctgccaccgcctcccatggccaaaaccggtgaaggggcgcggagtggccgccggcagtggcttgccgagctgcgctgccgacgcccgccaccaccgtcgtttcagccgagggagggaagcgagagggggcagagggagccgccgccgctgtcgccggatctgtcctccgcagccgccaccaccactggatccacccatggccgccgcgaggccgccaccgccgctagatctgccgcaggagggaggcgagagggggcggagggagccaccgccgccactgccggatccacctcctcccgccgacgccgccaccgccaccgccaccgccgccggatataccgcgggagggaggtgacaaggggttgagggagccgccgccgccgccggattcgtgccggaaggagagcgccgccggtggaggaaggggggagtggccgaggggaagcggcgctgctggtgggtcccctcccagtcgccgcgccgtgccggtgagacaggaggaagagggggagatggagcggtggcgccggtcaccggtggagggagggggagggggagcggcggcgctggtgggaggaaggttggggagaggcgctgccgccgacgttgttttgagtgagagagagatggggaagaggaaatggttttagggttagggtttgggctgctgagtatttgtatagatcgggatcaatcaggaccgtccatcagatcggatggctacggcttctcccgcgtcgggccgggcgccgttcccaggccgcccacactattgggccacatgtacgctccgcacaaataagtttactttatgtcgctcaagttgtccccgaattgttcccaggccgcccgcactattgggccacctcatggaccgcatgtacactccgcacggaataagttcactttaggtcccttcagttgaactttttttatttcaatatgtaaaactaaaccttaatcatctaatatttttatatttgttataattttagtttttcgttgcaacgcacgggtatttttatagtatatacagaaatcagaaatgcatgtactggtacaaactcttcctaggttgcaaatttgctcgactatatatgaattcttgtagccgcactgttagctagcgctaaggccatgattgagatagctaaacacgttggattgatggataatctattttttttatgatatctatttaagggataaacgaataaattaactacaacaaagttgaaaagatgctttagaaaagtattacaataaaaattatattataaaaattttgcacgaaacaaaccatctaagagcttggaagcatgcaaacaaaaacctagaatccagaatcatgaaagaacagggcctaaaagctaaagctaccaacttggggtctctcagccttgaaacataagaatgtacttgctctgagagtttgattgaagaatcacagatctctgatgccatcaaatagtactgctagacttctcttagaaaacaaaaaagaaacactgtgtgctagattagcctgttgtttggatctaccttaattttaattttaattgtcagggagataaaaaaaagaaagagaaaaggaactgtgcacgctgcacacgggcaatcagggagggagggaggtttgggatgtttttctgaatgattaatctaatgacctaaaataatgggttggatgtttaagttaaaaccaatgataatatgttttgttttcctatcatcatttttaggatttcgtctgatttaagagaacaacgtaacatagcgtttatagaatgtataatgaacttttaaaaccgcatgctgcacggaggaggaagtgagggaaggaggtttaggattttttttttaaaaaaaaatagatctaacgacctaaaataatgtctcaattgatttaaaataatgtgtccatcaatttgagtcaaaactgattgttggatgttttgtttttgtccataattaagaacatcatgtagcggattagaagcgtttatacgatgtttaatggacttttagcatacgatgtttaatggacttttagcactgcatgggggtagagggaggggaggtttgggattttttttttggaaaaaaatagatataccaacctaaaataatgtgtccatcgatttaagtcacaattttgtggatgtttttattaagaacttaccagattcttctctaatttaataatgttatgtagtggcttagaagcatatataagatgttaaatggactttaacatcatacacgggcggagggagggagagatgtttgggttgttttcttttattaaaggaaataactaacgacctaaaataagaaactgatagtcgaatactttgtttttcttagattttctagtattttatctaattcagtatcaccacgtagtgagttagaaaacattcttaaaatgacatagggagagccgctagacatagtagatagaggtctatttatgggttttttgcccataaaaataattttaatttgtcatgaagataataaaacagatgaagtaatgcaaggaaagttcgggatggggtttccggttttttttttacaaaatagatattactgtctaaatggttgaaaatcgatggtcgatttaatttattaaagtgtcatttagcgaattaaaagtgtttgtagaatagcacttaacgagtcaaattttattatatgctagcaaattgcccgtacgatgctatggaaagaattaaatcaatgcaacaataacattcggaaacaataacattcggaggaatcaaagtcctgctttaattagctattacatcagtaacaacccgcggcccccaaatcccgtcgccctcctcacaatcgactccctcaccccgattcaccactggtctcctcctctccgctgcacaatcctccctctgtcaatcgcccctcccaccccttgccctcttccaccgccgactgtcacgtcgctgccgtcgtgttatcccgccgccggtactgtagatccccgatccgttgcccgcctccactcagctgtcgccacctccacatccgggaagacatcgtcaccaccgcctccgtccgcgctgaccccatgctgtccatacccacacaccgccggtccagtgcatgggcaatgcttacagcgtagccctatactcctatattaatcacagtagggtaggtagtacaaacaaggtgcatatcagaaagcgctgaccccacgctgtccacaccgacacaccgctggtccagtgcatgggcagtgcttacaacgtagccctatactcctatattcatcacagtagggtaggtagtacaaacaagtgcatattagaaagtgattttgcacttcaaaaatatctatttgtgatatattatatagtgtaaatcaagtttaacatatatgagtcagtggcggatgtaggattttataaataggggcacgataaactaatctatttataaaacaataaattatctaagtgttataaaatattatctctaaagaaatgtaaaaaatccaatacatcataaaaaaactagactagaaataaactaaatcttattttttatatgtagatttcattgtaactagacggtaccccgcgcgttgccgcgggtgcgaacatagccatatatggacatagatgttatattcaattttatttgcaaccacttatccaatcaaatgtgcaaacatcacatagatgggcaaacatgctaaacttgattaatttattttatatgtataactgacttcacaagtcccagagatgatatgaagggaactcattttacatgacaaaaaggcaagatatatatgaaaggatatattttttttaatgggcatcaaagtgcctaatatcaagcacagaggtaacatggaaaagaatcaaagataaaactcttacattccatgatacttaaggtctccagaatcatgaattaacttggaacagggaattacagcttcaattgttggtgccctaaccattaaaatttcctttctgaaccgctgcagtttaagaaaagaacaaaaataaactcataatggtgggtattggagcaaagaaagtattaatctctcctgtagttcctcaaagcagtgcttgattatgtcaaacattacagtttcacttccagtcaacacagagccaaagaaaatacctaagaatattgcaaggtacagctatgttacatgcaagccatgtcatgccactttgctgggtcctctgaaagcagttcaagtgttaattcatatgtaaagattagtatctattttagtttttctctttatacctatagattagtatatatgttataatatcagtaattcacacctaaattatattagtatctatgatatgttctaatttacacctaaagattatactacctccatcccaaaatgtttgacgccgttgacttttttaaaaatgtttgaccgttcgtcttattaaaaaaatttaagtaattgttaattctttttctatcatttgatttattgttaaatatacttttatgtatacatatagttttacacatattacaaaagtttttgaataaaacgaacggtcaaacatgtttaaaaaagtcaacggtgtcaaacatttagggaaggagggagtagttatgtaaattaccaaaaagggaaaaatattgtgcgcagaaaaacccgggacataaatctgagatgccataaaaaaaatatatgccattacagtcgctgaatgttgcagaactacataatctggtagaaatagaacaataagttagatagtggagtcatgtttcatttgactgataactatgcaatacattttgagctataaggagaataagatagatgctgctagcagttcagtagtacctcattgggcttctatcactctattttagttcaaaagaaatagtacatgcagttggctgctacgaagccttgatgtgacaaacaaaataatttcatatttctagtatgaagatatcagtagtttagcaacagaatgtaaggataattagtacacgtgcttgaagagaccacgaaattgcagcatgtcattcttgccgaattcctgcgtttcacctcccatgcagctgcagagaccaagacagtttgctcatgagtgaaattaaggtgcaaaagataagtagaataaaccttcagtgtttgaactggattgcacaagcagtggaattaatcctaacacatagatatgcatgtttccatatagagaggtggaaagcaagtcgactaaactgcacatatggctgtgttctgaacataacctgggtataagaagcatcacttcagctgcataaaggaggcaggggcggagctaccattattcctgggtattcccaggaatacccaactttttttatcacaaaacaagtatacttctagtatatacacatgtacacatattagtgcacctaaatcctcaattcttcaatccaaacacagcccaaccggcctcttgcgacgcctccaccaacccgacccattccgtcatgacccatcagacatcagttgacccacttatccaccacccttctagacggccccctcttgctctctctccgtgacccatccctccctggctcggctcccctcgcgccgctccccatttccaaaccctaggcggcggcgcggcgaggcggcaaccggcagcgggagctggaccgtgctatcgcggagggggaggccattgccgtggcgagcggtggccgacgcccgccactccgccaatctcgggcggtcaggccggttgggtggccggtggccacgaggggcagggccagcgcctcagcgcttagacgggaatacccaactttgaaatcctggctccgctactgaaaggaggaagatgcacatgtttttttaatttgatgttgttgccccgattaatcaaaaagaaactgaaatagcaatcccacaccatttgctagacccatgcaaacagatggacttgctttctatgcataagaatgttgtggagaacaaaaatgtctgcatactgaatctataactattatttttacttttatatgtagatagtacttaccttggaggtaaaccaaagaagttcaattctataggtagaaagcactggcaacatagctgaataaattttaagaccgcatatatgtgaaccataaaagtaagcacaaaatagaaggacatctgagcaagcattttttcctgtcaatccaatctaagtgctgttttggcacaacatatctaccagaagtgtttcttcagtggaataaacctatttatcaattcataagagcacagctgaatgtagcacctgtactatagcatcagaaagttgaaagcatgaggctacgagactgtatggatagaagtaaaataaagtaaaactaaaagttatagttagatcaaactaccttcgtcaaccaaaacaaagccacgagtcttgcactgcaaactcaccagccaatcaatacttgcagatcacatttagcagagattaagtgatagaaaataaacacaaattaaatcactgtgaaaaataaaggcataaaggatggcacaaactcaacctgaaccctaggagcaactacgacggtgcgaaatcaggcaacggcgtggcagccgaggtagacatctaacgtggggaaagtttataggacaaaacaatagggtttattaagcgaatggcaacacgggtgaataaatttgagcgctgcatagatggaaactatggaagtaagctcaaacataaaaatatatctgaccaagtaacttctttgttgccaagtcagtctaagtgctattttggtaggtttctatgaaaagggccaaaatatggtctaacattgttaatgttatgataggacactctgcatagatatcgattgaagaacacatctcaacaacatatggatttagaatataagaacacgtgaatataactctgatggggtgacatacatataaatggtaggcaattgctattatatggactgatagagaggattttgacattggactcataaatcccttccataggaatgtgccatcgccgcccatatatactctttgcttgtctgatgcacactgcagacatttttataactataaatatacataaaaggctagtgaattaccttcagtcacacttgtccattgtactttgtgatacggaccaatcactgtagtaaacattcactaaatcagttaattaattaacatgtaaagcaagacataatggctatgcacattccaactggagcatgtgtatctgaggaaaaggtaatcaacaaacagaacatacatatgtgatcttagtgtttgtgcttaaaaaaataactgcaggtatcaacaaaatatgtcattctaacattgaaagttcataagcatattgtaggtaaaacatatgtaacctcatatctttagacttgatttacctcatatctttagacttgatttaccaacaccatagaaaaatagaaaaataaagtacaggctgccgctagtcatgcaaagttgatatgaaaaagagaagtgagaaaaaggattgcaaggagaactgaacaattaatttgaggaatccaatcagcaggaacacccacgtgaattttcacgttttggttaccacgtgcttatgggcggtcgatgcaccataaatcttgcaaaaccaagcctgcgaggaatgcagggaggagataaaacaacggctacagttaacactgtgacccgcaagaagacaccggcatccgcacctagcacgatgggaagcaacgatggtgatcactggccctgcacggagacagcgacggctggccctgaaagcctgagaagaaggcagcgactccggatccagccccgcgaggtcgaggggagtggaggtgctgaagagatgccggaggagcgacgcgagatggtcaccgggggcgtagaagaagctcacccggccagccgcggcggtcaagaatggcggtggacggcagtggcgttggccgcgacgaagcaggaaccctagcaggcggcggcgaagaagaataggtagcgcggaaggggatcgacagggaaaccaaaggagaaactaatcgcgacctcatgggagggtagaagcagaagaggagacggatcgttgacgcgtggcagatcagacaagaggggacggatagttgacgcgtggcagatcacacaagaggggacggatcgttgacgcgtggcagatcagacgaagtagacacgctgactagctgttggctgaacagtagtatagtaaaacagtaccatgggcaaaacttgtaggcaaaaactataaggtttatatgatgtataggcatgtactccctccgttcctaattgatcatcatattatatggatacaccaaaatttcaaatatgaataaagaattcatggtttaagttgaaagtttttaaatttaagttgaaaattttcaaatttgagttgaaagttttaaaattttgacttgaaagtttaaaaatccgagttgaaagttttaaattttaagttgattttttttaaataattgaaatttaagttgaaagtttttaaattttagttaaaagttttcaaatcttaacttgaaagtttgcaaatatgagttgaaagtttcaaattagtgttgaaagttttcaatttggaatatgaagtttctaactttgggtaatcgaaagacttaaattatatttgaaaagttacaaaaaaaacaacattgattatgcctaattatccgggaaaagaaaacaaatccagaactaaccaagctagtccaaatgctaatcgcttttttttgtatcggttttttccatagcaccgctcgtgcgttacactaacgacacatgtccgtgcgcgccagtaactcatctcgcgcgtacgcgctaattagtcttctcgcatttactcggataacaaactcgatgcatgtaccatcccattatttcctagccaatagcaaatcaaaacattgcatgatggttataaatactttgtgcaaatcaaaacattgtataatggttataaatacttgtgtgcatggatatcaatgtacatttatcgaatgcacaaataacgaatagacttaatgaatgaatacaaatatgatgatcatttggaaatattctaaaaaaatatatgatgatcaattaggaatggagggagtaactagtaaatagtgaatgtcataactcactcgaacaatatatatagtgcattatgattattggattcataacaagtgttgatcactagttcatccaaaaaaaaatatgactatatcgtttaatattattaacttttatagcattctagataatgtttagcaaaagtatctttctcttaaaaaaactagtcaaataccttttataaatataatatcattaacaaagataatagttattgtttcctcatgtaaaaacatagataatatatattatggagcacacacacatgagctagttgctactccctccgttcctaaatataagggattttagttggatgtaacgtatcctagtacagcaaatctggacaggctttatgtctagattcattgtactagaatgtgtcacatctaaccaaaatctcttatatttagagacggagggagtagtattcatgtgcaagtaatagtgctggttgtagtaatattattatcaaaaataaaaaagaatgagaaaacaagaagaagatgaaacaacagaagaatagaatataaggttaaagtttttagtttcacaccatttactacaaagaacaattttaataatattagtatattatcgattaatgtgagtatataccataccatgaatgtgagcaaccaccctcatgtgtttgcgctagtgactaacctcctctttttcttacttctttcgaagttctttgaacatatttaggtaataatgttttgttttgaataaaaaagaaacaattcaactagattattttttagagagaatccatcgtgtgccgctgactttgtccctgttctataatataccactgagtttgttaagttctacagtatgtcattgtattttgcttaaattctataatataccatcaccgtccatttaaattccattagtacttaattttgtcctaatgatcgaaatatccctaggaaaaaaatttccaaaatttggccgaaaattccgaaatatcatattataaacgagacagagaagttgcccatctcaaactttgtaagttttactatctgtatgataaaattgtataatgctaactgaggccaactagatgacaatggtatattatagaagttaagtaaaatgtgatgccatattagaacttgagaaacccaacgacatattgtagagcaaggacaaaatcagtgacacacaatgaattgtctctgttttttatagttgttcggttaactacctatctactatgatgcggcaattttagaaaaaagttaaatcttatactataagtccatatcttacacattaaattacatacacttataatataattttcaaaatataaaataccctattctcattttataggagaaatatggaaaatgatttattatctatttaattatgagaaaaatattagttcaaattaacatatatgtagaaaataaaaaacaatatgaaagaattatggaaatacctactaatgtagtcatcatatatcatgcaatgagaaaagaagaccatagtcgaatgctttattattgagcaaaaatgatggtattatttttatcatcttttagaggaatctatctaaccataattaattagcccgtgtgagtagaagtctgtatcgtcatgcatcaatatatcatgagattattagttatagctaagtacaccgacccaaccatacttagcatatcacaagactatcgggtaatggacaattatctttaattgtgctagagaaaaaagtactccttccatcccataaaaaaccaacctagaactggatgtgacacatcctagtaaaataaatctagacatgcatatgttcagatttattgtactagaatatgccacaccagttctagattcattttttgtgggacaaagggagtaaattacagtccatactacgtattcttaaaaattcttaaaagcttcatataatgttattctttaaccattctttatatttacacaatagctaactttacatttcaatttggaccaccttattctatccatctccaagtccggtgactcagcaattactccgcacattaactatctctctctctctccattttctttttccctccgatagttggataaccgatagatctagcaaggagcctagatatagttccttcgctctttgttaggtcagctcctacctcccaaagtccatgtaagcccgacatccccgacctcaacagcaaccataacaatagtgtgcatcacgataggagaggagaaaaagatttgtcggttactaaagggtaaggctgcgcatgtaaaggcaaagaggaggaacgatggtggctcatggagaaagagcggtgatggcggtgcagttagtggttgctggtggtatgaagaatttgttgtcgacacaatcacttaattttttcttaagtattgatgatacatgggtcaccagttatataaagaaatagtcctagctagttttaaaataataaaaatattgactgaattgaccattgtttcacaatggaccaggtcatggttagtcttttcaatttaggccatatatctttgcaattatttgcaacatggaccaggctgagagagttgggctggctgctaagatgacttttctactccagccatgtaattaacatcacgataagctcgagcgagcctcgatcatcacgcaaaccagaaaggggatcggcggcgctggtgaagttaggagaggaggcggtggccaggagcacaggacagtacagcttagagaaagattagagccacatacatttgggaggagttaatggattgattcatgcttgctttctcggttattttcccagcctccacctccagtggctgttggcgccgctgccggaccgggacaggtaacgggattacgattttcatttgggcagaagcaacggatgatatgattaacaggatgttatgcaggctgtagatcgatggtggaagcgcacgaagtagaagacattgccacttaattcgcagcgtggccttattcagttcatgatgcagctcacactagcattacaagaagatcaacgccattgccagtatgcctggcattacctgccggctgccgccatgcttcggagtggatggttcaccgcgcccgacagcgcgtcggcgagggtgtgaggctggataatggattggctaatagggattggtacttgccgtccaccactcacgctgttggcacaatctcctccggcgttgtcgacgtcggccttgagcccgccctacgagagccacttcatctctctactaagtaaacgcgatgttggagccgcgctggcagtgaaaaacctagattgctatacctggtccaagcaatgttaagtgaaaagtttggtatagacatggttcattatgcaacttgggtaatagttccttctttttcataatgtaacttactataccatagtgcaatttactctaaaaatattgagaaaagggcgggtatcgcgtaaaagaaaaagaaaaatctaagtctcctccgctccttgtgccgccgccaagacgaacaggggagggccgggcggcgagacgagcagagcagcggaggggaggggatcctggtgagcatccgcgtgccctttctgattcatctctctctctctcccaccccaccgggactggaatttgcttgcgttcgtgaaccctactagcttctcttctagatctggaagaagctcttttcctcctccttaatttgatagccttaaacctctcttaattcaagtaataacagtttgtttcttcacccaaacccccatgtcccaagttggatccgccgctgatatgagtttgtggctttcttcagtatagatgaaagttctcaaatatttacctgcaggggatcttaagtttgttgttcagttgagtctaggcagagtagctccgaccatggtttttctgccatcatgatcaactaagattcggttcttaaatagtatattttagaatcaaccaaaatacagtttttgcttatccttcttatatacttgatctcgtacgtttccaacgtgcacttagatatttgatctctcaagttctgaacaattaatctgcaagggggaaatgacttaactttttatcacttttctctacatgtttataattaaagctgccacaatatgaatgctccatatgtaaatgaatctgctgagtccttcttaattggtcataaggatatatttacaaaatatgtccactcatagttttttcagtgtacatgtatgagggaataacatattgagatgcttatgctgagggaagaagtgctatttttttttaaaaaaaatcgtacatgagtcatggctgtacctgacttgatgtgtgtatgatcggttttagcattaatattcaagcaaattagtgcataggtcaagttgattttttcctctataatgatagtttgtggcatttctggtgttcttgtgtgagttgtgttgttgagatgattgacaatttggtacttcctccgtttcatattataagactttctagcattgcccacattcatatatatgttaatgaatctagacatatattaatgaatctagacatatatgtgtgcctagattcattgacatctatatgaatgtgggcaatgctaaaaagtcttataacctgaaacggaggtagtactacattgaagtttatggtgatcttgtggcctgctgttcgagaagctgaaaaataaagtttgcatcacgtaccatgagattatttaacgagatggtcacattttcattgcatcaatgatttgtttatgtgttgcagtcatggaaattaatactggtgatataaggggctatgcttatgttccctctcgcaaggccgccgggtcgccattatgccgacgccacgctccgcagggggcagtggcggctctcccaccacctccgcgccgcagccgcagccacaagcggtggtggtgcgcccgacgtgttcgatgcagtgcctgccctggacgaccgcatgcggtgcagcgcgctgctcagggagcgcgcagtgggaggggaccactacgggtgcacctccctcctccggtggatgctggcccggggacttcgccccaacaggctggcgctcgctgcggcggtcaaatcgtcgtccgcgctccccgactgccgcggcggcgcggcgctcgggaggtgcctccacgggctcgctgtcaaggtcgggtacgcggatggcgcggtggtggcaaaggcggtcatggacatgtacgggaggatcgggtctctcgcggacgcccacacggtgtttgatgagatgagctgctccgacgcggtatgtaggaacatcctgatcactgcctcctcccgtgctggactttacaacgatgtgttccatttgttccgtgcaatgcttgctagtggtgtagatgagagcatgccaactgcagtcacggtcgctgtcgtccttccggtgtgcgcaaagttgagggtgctgagggctggaaggagtatccacggctatgtcatcaagactggtttggagtttgacactctgtctggaaatgctttggtatcaatgtacgcaaaatgtggtgggagcatagctatggatgatgcgcatctagcattttctacaatttgttgcaaggatgtggtttcatggaactcaatcattgcgggatattctgagaatgggttgtttgaagaagcacttgcactgtttggtcagatgatctcagaggaatgccttccaaactattcaacattggctaatgttcttcccttctgttcacttgtggagtatgggaggcactatgggaaagaaattcatggttttgtggtccgacatggtttagaaatggatatatctgttagcaatgcgctgatggcacattattccaaggtttgtgaaatgagggctgtagaatcaatatttagaagttcaaaaatgggagatatcgttacatggaacactgtcattgcgggatatgtgatgaatcggtatccctcaagggcattgaaactgtttcaggggcttttgtttgccggaatggctcctgattctgtttctcttatcagcctacttactgcttgtgcccaagtaggcaatctcagagtgggcatcagggttcatggttatatttttcgacatcctgaacttcttcaagaaacatcattaatgaatgctcttgtcagcttttacagccagtgtgacaggtttgatgctgcttttcgatcttttatcactattcagaacaaagactcagtatcctggaacgcaattctctctgcttgtgcaaacagtgaacaccatattgaacagttctttagactccttggtgaaatgtggcatgacgtaactcagtgggactctgtcacgatcttgaatattatccgcatgagtacgttctgtgggattaagatggttcaagaatctcatggatattccttgcgagtcggttatactggtgattcttcagttgcgaatgctattctagacgcatatgcaaagtgtggctacctgcatgatgcagaaacactcttcagaagccttgcaggacggaacattgttactggcaatacaatgatttcttgctacctaaaaaataattgtgtggaggatgctgagatgaccttcaaccatatggctgagaaagatttaactacatggaatctgatgagccggttgtatgcacagaacgatttgtgtgatcaagctttttgcttgttccatcagttgcaatctgaaggactaaaccctgatactataagcattacaaatattctttcggcttgcatccatctgagctcagtgcaacttgtgaaacaatgccatggttacatgcttagagcatccctagaagatattcatctagaaggagcacttcttgatgcatactctaagtgtgggaacatagccaatgcatacaacctctttcaagttagcctgcataaggaccttgtcatattcacagccatgataggagcttatgcaatgcatggaatggcagaaaaggcggtagaactattctccaaaatgcttacacttgacattaagccagaccatgtagttctgactgctcttctgtcagcctgcagtcatgcagggcttgtcgatgctggaattaagattttcaagtccatcagagagatctatggagttgaaccaacagaagagcactgtgcatgcatggttgaccttcttgcccgttctgggcgtctccaagatgcatacagttttgcgttggatatgcctcctcatgtggtcaatgccaatgcatggggctccttgctaggggcatgcaaggtccatggagaggtcaaaattggtcagcttgcagctgatcgcttgttctccatggaggctgaggacatcgggaactatgtgatcatgtcaaacatctttgcggctgatgataaatgggaaagtgttgagcatgtcaggaaactgatgaaatccaaggatatgaaaaaacctgcaggatgcagctggattgaggttgagaagacacggcatttgtttgtagccagtgatgttcagcaccaagataggttttctatctacgatgtgttgggaagtttgtatcagcaaatcagaggtacacagggagggacagaacatttagttgtgacttatgagctgtgacataaaacactcagtaaattacttggtgttctggccccgtcattgttttgggttgccaaagatctccatggaactgagtgacctttccatcacatcttccgtggtgagcttggaatctcattatttggtttgattctgttttaaccttcttgtcactgttgttcttgatgttttggtgtaacactttttctcacttatgcttgccattgtgcagagtaataagtaacagctactgatgtttttcttggaatacttacactacatatcacttgcagggattgcaatctcatatctttccaatttttttcaggacaacaaatggagacatctgcttacaaccgtgaaccggttggagtgtctttgtcagctcaaaaaaagattggttcctggcgatgcattgttcttcctgaggtaagcaatgctaagcgtgtcatttggaggcgaagcaaaatcccctccacccacaaaccgtgcgaagaaagtatttttcgctccccggaatccgctgtgacccatgagcggttgatggatttcaggggaacagctgacgcagcacagacgtccgaagctagcaaggcatcctcgtcctcacgtacgtccgatctgcccccttccacgccgtggttccgggagctgtgggtcaacgccgacaaatagttgcagccgtcgcctaaggtatgtcaaatcgagagaggagattggacgctgtggcgctgtgttctgtgtggttggtggtgcttcttgggtcatttgcaaacacctcctctaagatagcctgtctgcaaacaccactttcttaatcgagaaggtggtacttcttgattctaattgatgaatcaagaaagatggagtctagtatatacaaaatgtggtcatttgcaaagcagacagagaaaagggttgaagatctatattcagatgtgaaaaaggtaagattatacttcctctgattccatgcataagtcatctttgaattcctaactcatttccaaatataagtcataacttgaggcaccttttactctcattttttttccttctttgtcctttatgaatacatgttaccactcgtgaacatgtccccactgtgtataaatgaagggcaacgagctgatttcatcactttcttaatccttgtgcacaagtataaaaaaccatttgtatttggaatcagagtctcagaggaagtatatattatcatttgttttgacattcatgtgaacatagatctaaggcagaaatgttgtatttcttctgggtacggctgctgctcagtctgaactacttattagctttatagttggtggttaatttacatgtgcctgacaggaggttgctgttggtagccatccttactttttttaaataaaacaaatgttccagatgagatataatttttggagacaccagggtaaagagaactgtgggaaattctagaataatatacccaaaaataaaatcccttttgtttcttgaaaacacaggactacgcttcattttattaagaagaagaaatatgtacaaacgagggatccaaaaggacccctcaatacccccaaaaaaaacgtcacaaaaggtgttgcttgactaaaatcccttatgagaaagctaataagtgaaatataaaatagtattggccaagtggagtactttcacgttcgtctttcctatatccaattcagcactccactggaaattctgtgtgcccctacttcacttcagcttggtagtttcccccacctttccaggaaatctgggatagaatactttatgcccaatcattccaactaactatttcatcctgtcttagcgtagcttttggcacaaaattagctgatgcttattcctcagataatattcctctgaaaacatgaaaacattccatctaactatttcagatggtcataatccttttgtatttctttggcaagccgttttgtactaaaacctgccctaatgtgcttgtgtgagtccttttggactcttttccttcttattaatataatgatgtgcagctctcctgtgtgttcgagaaaaaaaaacttgaaaacattgttgggtttgaccaatgattaaggactgccacgatcatcaactgctacagtttaactagttaagaggttccgagatactccctccatacccataaaggaagtcgtttaggacgcgacacggtctccaaaacacaactttgacttcttgtttctataaaaatatttattaaaaagtgatatatgtatacttttatgaaagtatttttcaagacaaatatattcatataatttttacattttcaaactcaacaacttgagagttatttatgatttatattcccaaggtttgacttaaatattgtcctaaacgacttcctttatgagtacggagggagtatgtaattgccaatttgccaagtgctattgctctgtgaagtgttctgaaatgttcaacacctcaacattcaaagtctctacatatttctatatgtactggcatggtagttttcattcatactatggaagctaaatagaactgtgtggcatctgcagataacagtgtcctattgcttgcatatgagagtagtaaataatttgattttgttgcgaaatacatgtgcttgacatgtatgcttgctgttaggttgatatcacccttatacaatgttccagataagataattgttcgatgcaccacattagaatttttttcctggcaacttcttttatgatatagcaaaataaaagtattaaaagtaaataaaatgctttattcatcaaagaacttgaaaatattcatatggatttgagtagggaagtgttatgatgatctccaacattcctgcagatattaaaatttctaaatttatattgtttctttttctttgtgcaattttctccaactacttagcagctaatcatgccttatctatgttttcgttaaagcagtgaacagaacatatgagcataatctgaacagttacttcagtgttaagggatgcttttgggcatgtgtttaacagtactgatttcattccatttcatttttataggcgaagatgaacttgatgaaggaatctaaacattcagtagatccagaagctcccttgctcatagcatagacccttgaattttattgaatagttagtttatgaaactttcgttactgaatatatgccagggtgtgcccccaagaatcacgtatttttggaatttgaaatgaaatagtaccaaacaaatttggagagtgatgaacttttttctttagtgactaatgttttatatttttgtcaagtgccatgtttcgtgctaactttcctaaactttacatatctctagacgtgagagaatgttcaaataactgatcatcaccgtaaggcggcaaagccgcggcaagttttctacttcttccgacccaaaatattgctagtagtatatatgtggttgttttttaagaaagaccctacgtttccctgttttagagcgctatccttataagcggaattttcgcttcttgggattgtatttctgtcaaagacgagtagttttccggataaaacacaccggtgccttagtcggttcgagggtatatgcatattcagtgtaaatgtgaggagttttttttttgcaaaaatactaccacgcgtcttttccttcgcggatgtacacggccgtgcttaggctaacccacgaaacccacttataagctaaaataagccgcaagtccgtttattttgatctataagtgggttcgcggctgacccacttacaccccttgcgtgctaaaacagcgcaatgaccagttgaatggcgtgttgccgattcctctcacccgatcgagtcatgctccagagcaatacaaacgtggcagcatctcaagacgccaaaaaattttaaaaaaaaagaaaggagaaaaaaaaaacgtggcagcatcccgaggcgcccaaaaaaataaaataaagagaaaaatggtagctttagtggtttattaattcatgattacatgtgaaactttgataatatatcgtatattaatatatttatattgttttattgaactgtataatagtacaccagtatcgactgtactagaacactatattccaagtaggtgtgggtattcggtctgaccgaaaatttcagtctcggtatttggtctttatgttagttcgtctttaaaaagtgaagaccgaatttcaacacaaaaatatcagtcctgaccgaaattcagtaacattttcatatatgcaaagaaataattgaaattttcaacacaaaaatcacaaaaaaaatcgcaaacacgtatgagaagactcttattaggttacatgcctgaataagtagagatgtgaaaattagagtttaatcctattgaacttagtggattataggttgtattttgacaatttttttaaatttggccttttcagttaaccaatgagactaaccggatttaccatacaaaattcagtcttttattacttaggactaaattggtctcggtctttcagttcagtctttttctactaacccctaattccaagagccaaacctcagtctttttggtttgttttttttttctcacccctaattccaagagccaaaccgggatggcctcccgaatggaattgacaaacttggatcagacggcggaagcttagcaaaaatttacaaatgcttgaaataagcataacaaataggcaaattttgctacaggacatcgcaactttgtggttttgactgtaggacaccgcacgaagtcacttttgggaaagaatactctcaaaagttgaatatttgctggtggacatcgcacccattaaaataatattttttggttgaggagacagaaatcacgtgaaagtaatgaatgcccttgggccacatgtcggatccctcctcctcgattctgagctcacgcgacaagtccaaccaccgtggcgatggatttctccggcggcgccggcgcgacgttgctggagatgtaccagaacgcgtggctgctgctgctgctggtctgccggtgccacccggacgcgtgccccaccctcgtcgctacccccagtatggcagaggccttccgagcccacctcattgcggatggctgttgacacgggttttggctcgtgtcctaaatataaatataatttgttaaattataaactaatatattatcttaaatatagtgcgtacaaaatatatataataataaataagaattttattgggagacagatggtgaagtaatttaaataaatagcggccacgaaataaatggccatgaaataaaatataattcacttatattggacaaaaataatttttggcttaaaataggaatgcatatacgcgttccacataaatatagcgtgaacaaatatttttcatgcgcttttcgtcggaccggcgaacgctaatacttagctttctcgtcgtatccgcatacgaaatttggcctaaaacatatggccatgaagtgggattttctcactacctcgaaatagtcacaccccgaatattttcagaaaaggcgtactcaccatataaaatagcatacaaaaattaaaatgtaagccaaaatagatgtttagctggctagtgaaaaaattatactctaaatagtcgtgacttaaaataaaaatgcatgttacatgcgcgccaaattaaagggggtcgcgtttgacattatccaatatttttatctcgatgtctagatgttggcttgagaaagccaccgtgataatatgcatgtcaagacgcgatgcgtgtcgtataaaataaatttacggcagtgacagtccgctcgatagaaaatgatgcactagaatatatacgtgtgcctctttaaaaaaaagagaaaagactcatatccaaagtgtttataaaagtaaataaataaataaattgaggcgcccaattaaatgggagtatatgcagtcaaaatataggacatacagaatagtcatgcatgcaaaaaaaataaaatttgaaatcaagaaagagacacgcatgtatttacaaacaactgaaatttaaagaaaaaaaatcagtcaagtccaaagggcccacacgtcagtgaaagcaaagagacaagtggtcaagcccataacctacccacgatcaccactaatcatgcatgcatgcagcaaataccagcacattcgtcccgtcaaactgaacgggcccacatatcagccaaagggatgtgcatgcagtcaagccattgcccacaaccaccccacgatctctgcgcgcgcgcgggatcctgttcaaaatcacataaagcaaattaaccccctttaatcctcctcgataaatagaggatcagggctagaggcaaaggggagttcgctggggagaggttccaagaaggttggtgtgagggctggctaaggcgaaaggctgctgtgctgaatcgctgctattacctccgtcccatattacttatctttttgagtttttgtttgtcaatgtttgatcattcgtcttattcaaaaaattttggaattattatttattttgtttgtcaatggctttattatcaaaaatactttacatatgacttatctttttttatatttgcactaatttttcaaataaaacgaatggtcaaacgttgcaaataaaaagtcaaaaacgtcacctattatgggacagagggagtagttcgctactgcaaagcaattgccgccgtgctagtttctcgctctgctgtgccggaagaataagaggtgttccaaggtgggaatcatgatcctccttcgttcttaggctcggccattgtgtacgagtcgaggaatctctcaattctccttcctctgctcgtgttaatgtatttttttgctgtctttcggttcggccaatgagtacgaactagggaattatgttcttgacatgttcctaggcttggccatcatgagtacaagccaaaggaatttttcctctttgttgtgtccttcgtctcagccaacgcgtatgagacaaggaagttcgtttcatttgatggcttttaacatgatttcacactttctcctatggtccggccagatgaatacggacctaggagtggtttccatgcatattcttttcatgtcatcctaccataccctctgatttggtcccgttagcagatacaagcctaggcgagattctcgctctcaggttcggtcctctacgagccgatacaaatcacagatacaaacataaattttgcataattcaccataagttaaataagcacttgcttcggtcacgcttcatagcttcaagccgtgctagtagtgatacaggcatagtgataaacaaaattaattgagcatattaattagcacacatatttgctagttttgaacatatgttcagccatatttctctaacaagaattaaaataaaatggcgtttattttctttcccgtcatcaatggcatcggcgatggggctagccggcgtccacgcgctcccgttccacccacggagtacagcttcccagccggcgtcgagctccatcgtgctcccctgcgctcggaggcggaggggcgcggtctggtggtgtggtgttgggcacgccaccagcggaggagcgccgctgtggatgtggccaaggtaggccgcgcgcgctcagcggcggggcgccgccgctgagcgggtcgctcgtgctccaggcgccgccatcgagcaggctgatgtcgcccaagggagaagcgagaaaagaggaagagagaggaagagataaggggtaatttagtcaacatgaaaacattaatttaatggatggagtgtgagtgtctcctgagaaataaccacatttacaaagcgtgttcctccaaaagtgacttcgcgtggtgccctacagctaaaaccacaaagtcgcaaatgtctggtagcaaaatttgcccaacaaataaaattcttttgctcgagactatacaacgatttgtcaggtctatcggtttctggaattgtagggacaaaccaaaatgatatcaggatgcttcgccaagttcagagtacatctttgaaccaaagatgaattgatgattagttactttaatcattggcatttggtaccccgtcaaggaataaaagactacacaacgaaaaatacaaggggaacaataaatacctctgccattgaaaagaaaagggttagcattgtgtgctttctaaaatacaagttaagttgattaaagattacatgtacaattctgtaattacagcatcgtgatgacttgacagcagcaacatggttgtgttgatttacatcttccaactccctctgcacagacctgaattaagttgcaaatggcaatccattaaaactagtcactttggcgggaaagaatataatagcacaggtgtaacacaggtcagctatatggtcagtttgcaacaaaaaaaaaagtacccaatgcagaaacgttagcaacaacgtatataagtttgtgtccttgggtatataattactatatataagctcataattattattccttatataattactatatacaaggaataaagggcaatttgttcctgaacataccaagccgtgctggcaaactggtcgcgacaaaattcccagaacaaaacagctagcctgtttcactgactcctttactccctcgagcaaaaattaaaaatattgatttgaagcaggttttatatttctgggccatctattattctgtgcagggtaatttctacttttagcgtggcagaaattttattgataaatctcatgcacatacaaagataatgaattcatattaatcatacccagcagcagagaagcaaatacatacacctatatagcatgagtattatggtatattataaggaaattttggtttggtgacaccaaaagattaccgtctttgttttataccactgattcacatgagcactttaataccatccaaagatcactcatgttcctcttaacatcattccatccaaataccattccatccaaggctaagctcgcaacagccataaaacgatttcggcactacaatttggcctggctaatccagacagatcaatttaagtgtgaaagctggtatcggacctctcaagacaaacctttaccaaaaaaagatctggtaaccggagaactttgtaatgaagactaagtttgaagagaaagatattagattggggggtctatggtaatcggagaactttgtaacgaagacagagtttgaagagaaagatatcagcttggggggtctaaagtgtgtgcccaactctgaccaccctcatgttttgtctgtctccactctacattgttgcagccaaccctagggagaggatgaggtggtgcagagacatggcaggatgcttaacatgatggcaaaggtgaatgggtggtgctggcaattaagagggaagagatgaggacacgtatccaacacagtcttcactggcaacaccaagatcaaggacctctgcactgacaagctttgacaagcttttcacctcgctgcagccatgaaaagtaggcatcccgcatgaagacccaccaccaagcacaccatcgccattactccgactaatgagtaatgtgtggtatgttcatcgcctcactgtgcatagagatcgagcagctccagaaactcaagctttctagcacacagtggcactgcacattgctaacaatgagtaatgtgtggtatgtttgtgtttcaatgtccatctgcactgaagataggagggaaagccaagatgccaatgaatgttatttcatctaacataattgcttttggtaaaaagaaggcttggatggaatggtattaaggagcaatagggatcttttgatgatatcaatgtcggtgggtttagtggaacaaaacaagatgggtaatcttagactgtcaccaaaccaaattacgcaacagttccatacctatccccaaggcactctagcaaactcatttgagaatctgccatgactttgctgaaatctgatgatttccttgaggctcacttgtacaatgataaactttgcagaggaaaattcctgtagtgacaaccaatcatgatttcagtcaccagcaagccaaccagaaaaggcatatttggtcatagtatcacctatagacagaaagtttgattatacttcatgaccaaaaggaacagaaacagcaaagtgtccctccaaccagtgaactggataacgtttgaggccaggaatgcaacagacacagaaaaaaaattgagatgttgataaatggtaattacctggagaagtacacataacacatggcaaccaatcgttcagccttccagcgcatatctctgaatctacaacaaagaaaggaacataccgttatatcgattttattagaccgaatatgagcacataatagcagcactatcattatcaaacctgttgacacaatagcattaaattaaatgaggtacaagcaaaaggaaagattttcacggaaataaataaactcctaacaaggcttgtatctggacaggtcacaggtgtctggttgctgcccctaagtttgccctattaatagataccatattaataaaatatgagataggacactaatttatgagaatcttgctagtttcagcagaagtgagccaaatgcatacaatctgattaaaattgcaaaagatctagcaaccataactgggccaccattggcttcaaatgtattaagtagcaaatcatacaggttatcaagtaaaactaagtttgtggtggctaaatgtccacgacaaaagtcttaactattaacatgaatagaagactccaaaaagtgatgattgcccaactgaaaatccatggtcaataatttatttacagttccctggaaataatgaggtaagacaattttgacctatttgtgatggataatgccaatttctgtactccattatcgtgtgcttaaagatatattagagttatcatgaaaatcggagtgaactgttgcatcatttatgacttgttcagaaaacatccccgttgttaaatttcggcccattgttaaatttcggccaattgtcatgctgtttagttccaactttatttcgtaccagattactgtaaagtggaaactcgctgatagcatggacttggtaacacatgccccttagtgggttggagctcggacacagacccagtaaaactctaaagggctgtttggtttgaggaatggccgaatgagattgtcaattgaccacttgatcctaaataagtttggtttgcggaatgaaatgtggtcatcatatatactaagtgggaaaaatgaggaatactagtcattgaaccaaatttgaggaacgatcttacgatggaccgaattctgatcaaaccaaacaacccataataacatggactatcttgtcttagctttgcatatttgaacctatagttacttataaaaaaaaagtgattgaccttgataaatcaaaaaccacataactagtttaaaaaaatctgcatccatatggcaaagtgccactcaaactgattatcttaggctcaacaaccaagataaagcaactagtttatttgtgaagacaacatgattcgtgctttgtaaatttcttaaagcccagagccagcattgaacgagtccatgcataatagcaactagttcatactttcatccagacataacccatgatagttaaatccagaattcctacatttagaaatgtaaatgctggttaaacatccactaaacttccagtgtagagaatgaaaccaccaccagacacatgggccacgagaaatgcataaaatatggctgtggtggtacaatataagactaagtaaaccagataattaacaaggtatgaccagggatcggaatcccggcgataaccagcacagttaccgctccagagccaccagctagtatccaacgtacaggccagaataattcaattttaaattataaatcatacgaactgtatatattcttgcaacatcatttgtaacagagaagtgtaacaaccgaaaaggagagacgcattcaataggggaaatctaaaaagagccttgttgcttgtttctgcagctcgaggcagtctagtcaatgtcacctgccatcatagatcggaatcccaacagtaaccagctggtaaccgttcaggatctgctggctagcaggtatctggcataccagccagaataaaacaaaattttaatacaaactgtatattttcttgcagtgacatgtgtaagtacatttgaattatatgatagagtaggaaaaaaataggcacattcaacgaggaaaataggaaataaaatatgaaactcccatcactcgtcactgcagctcaagcccttttcaatcaacgcctcttgccgtcatacggttagatacaaccgatgtcttggttatacatatatttcacaaaaagaatatagactgttggatttgatacaaaccatttcactacaaaagattgcattttgaccattttggtcaaattgtgatgcattgatgtattttatgtgccaaccggttttggaattcaaatatttggactcaaacatgtcccataactggagggaccagtattttcttttcgaaaccggtattcaaaatgttatgttagatgaaacaggtatcttggttatatatattgtgcaaaaggaatatggaatattgtagtattaaatatgcatgtcactacagttttaattttgacagtttcaatctaattgtgatgtattaacgtatcttatatgacaaatctatgaaaattacacattacacatgccaattaaattgaattcaaaatacgactgccagtctttaggattcaaaaccttggatatgacaactggggaaaaaaggactacctcaagcatattttcctcgataaagcaattcaaccctgtgcttgtgatatctgcaccattgtgctgcaagatcctgagctttccttcctgatgcaaatgtgtgagtgcatgaattagcaaagcaaatatatgttgtgtactgttgattgatctaatttgctatttaccttggtcccataaacaagaccacctccaggggaaggatgaaagcatgcaacgtttacttcatcttcagcactaggaagaactcttaccagctccatgtccgatactctatagacctaacgtgatgaataggaataatgagattaaggcttcattcataagtaagaactgagcttgtaagtggcacagaaaccggagcaagcaattaacacatgattaattaataactaaatattataaatttgaaaaaagggttcatttgaatttttaaagaaacttttatataaaaacattttgcaaaaaatacaccgtatagcagtttgggaagcgtgctaacggaaaatgaggaagttgaagtttagaacagggcctaaatcatattgttagtcatacagaaacaaaaggacactaggagttacaaactataataagaaaattgttcagactgaaatatttaaaataagcagcaaaaacagaatttccagtattttcactgatatgcttatgcataatctaactatatgtacctccaagatagtatatacaggaattccagtttccccatccatcacaatgctcctaagcatagagttatgacgacgaccatatgccaatagtatgtgctctgaagtgggtgagaactgcagaaaaacaagtgctcaccaaattaactgatgaagaaagttgttgaatttcatatcaatatttctcaagtttaggtcaaaaatgcaaaagccagtcaactttataatgctgctactggacaatgcttgagacacaagccacaagttcgacagcaattatctgaggtatataatatgtttctgctcccagtagaagggtggcagcagagatgcctgcttatcttttgcagcactaaaaaaccaacaaacacacaaacaaatgagatgttaacctggatggaagttaagcaatgagctgcccttatcgctcttgatgtaagaactttgccaaacctgtaaggaaaatacattcacaatttcaaaataactagaacgtttacaaatgagaaacctagcaaaagagcatactatgtaacaagactgttgagaaaattacgttgcctcctcaagagagtaaactcggagctcataaataactcggtgagaagggagagggtgacgagttggtgatgttccggcccctgcagaatcatactgcacaggcaattggctaccacggtcgccttcagtttgaggcagcaaacaggcaacacatgctaccagaaatcgtccacaaggggaaaaatgggcacccatttcactgcaataattattaactttagagtaagcaaagaagggtcaacaatccactgcacagtttgtcaaaaataaaatacgcacttcatgtcaaacatctaaaagatactccctccgtctaacaatgtttttccacagcaccccatgcgctcaaaccaaggaagtacaaaatctaagaaaaatttaacgagaaaaaaacatgcatagcaaaatgcaaccattttacccatttcaaagcatttaatgagtgaaaacattgtaataaccacattcttggttttcttaatggacaaacattgtgaaacagaacagtaagtttttgttgttgctgcacaccataacttatccacttatgtacatattcaggcaaagcaatacaggaaacaacagaaaggaaataaaagtttgtgttgtgcaggaaaaatgtgaatacaagaaaaccaaaagtacaatgaagcacctgcagagaacggcatgagaaattgtcaaccggcatgcctcgggttccaatgtaacacatggatccttgatatcatgccgccatattctaagcttcactgtgcaaggtaattcagcagctccagcagcaagcagtgaggtagtaagttcagatccaacacctaatgatgcagcatgaacctcagcttcatcaatttgggggcctagaagtgaactcccaaccccacgtaatgagcccacaacatgacgacgagaagcatgatgtcgatttgatcctctagaactgccgacatcaatcggaatagatggagaagcacctgcaagttcaattacacagtttaatcagtctcagcagtgccagtaccacaagaaggtaggcctccagtacaaaggcatcatcatttggaaggtgcagggtgcaaacctgtatgattttgggccatgaaccagccctgcaaaaagggaagctcccagctacgcgagtcactgaagagatcatgatgatgatttccaccctctgaatttcttaggatcatgtgaacatctaatccactagaagtggtaaacgaattcattggcataccatgacggccatcatgttctgaaggctgagatgttgctggaatcggcacgctgttgctcagggagggcatttgcacatcatctctagcagtagaactctcatgattactagtggagctactgcccagtaatctggagctaggttgccccctgtcaatctgcatttcaactccacttaaaccagatgcagaagcatgagaagtagatggttctccagggcacacatccataggcgtgacaagttggtcaggctgttgattttcaacatctgatgccaatggattttgagctaaagatgatggtctctgatgcacattggttgaactactaaccaagtcattgcgaatcagacataaacttccatcatccctgaggtatgcaggccaaagcaagcaaggtgatgatgaattagcctcatgatgtggacagtttctggaattaatatttgcaaaaaacacagccgagggatagtttgaatagcccgaagaggttgcaagggtcaatggtgagtccgcagaatcaagattattaacctgaaattgaatatctgcataagatcaatcggtacatgaaattatgcaaagaaagcaaaaaatgcagaaaacagtactacctccgtcccagaatgagttttagggttggacatgggtattaagaaagcaggtggaattaaatgtgggaaggttgtgattggttgagaagagaatgtaggtagagaagttgttatattttgggactgagggagtatattatttctacctctgcagtaagaagatatggagcaccatgggggtgaaaatggacagctcttagtgagcggcgggttcttaatataatggttggagcagcagcctcatctcttttattgtagttccatatgtacagctggcacaatacattgcattgagcactatatgttatttgatcattgttcataaaacaagcacagaaagacttcctttttttttcaaatttaacactataatctcactttgtgacctgatgcaactgccagaatctccccccttgcatgaaatgctattgatgcaattggccgatctatcaaataagagaacatcactgaaaaggttagtattcagatttcacccatggaaggagacatactcattaggatctgcttagatatattacggaagtcctgagatccaatacagtctgaggttttagcgtcccaaagacggacttcctgatccaaactaccgctagcaaggatatcaggaagtaatggatggtatctaacctgaaatagaacagaagaaactcaaaataataagtggcaaataagactgcaaaaacagcatttatgcatttttatgtaaaacatatataaaatgctccctatggactaagctgccaagtggtggataaggatatgggtacaaacatgacatgctgatataaggcctgatggttagtaaaaatatcagtacttgagttgtttatttaaaggtcattgtgacttaaccccaagtcattttggtttatcagcaccccctgtaaatcattgtaccatccaaaagtgcaactatatcccctacaacagtgccccccaaccccccaatctatcttccccttattgcgctacgggtggtaatggtaaattagtaggacccatgtggcgtgcaacacatgatgatagcagaacagctgattgtgacgatttgatgaaatatcccccaacaaattggtcaagtgaatcgtgaaattacaggcaacagtgagggacagggttattacagactgaaacgactttgagggtgccaataaaccaaaattacttgtaggaaggtaggtaacaaaagcagtgacttgtagcagggacagggtaagatttatcctttatctataagagcttgtagcacacattctggaacatgatgacagtgttcataatcataccacccaaggcgtgcgccgatgtccactcagcactttcaaacatttcccagtttgatagtcaattattttaacagtatgatcaccactgctcaaaagagatggagttagtccacatgccttcactttaatccttatattccgcaaataataaacttactgtgtagatgcaagtgttttcccatctgggctgaatgcagctgcgatagtagacctggggggtggcaaaagaggacaatatttggcagaccagtgatgcagggactgtgattctgccctgtatacagaaaaggtttcattccagggaaaagttaggtataagagtgagagtacaaaactatgtaactcaacagttaaaatagacaatgaagaatagttcatagggtttataaatatttaccaaagaaatattaggtgtaaaatcgaaagtacaatatatgtaactcaatcattactacagacatgacaaattgtgcttaaaccatcctggtaaagtaagaccccgtaccatgaatatatatcatgtttagcatctgtagctgcatatcttagttcattggaatcagcatcatttcctggagatttgctccaaagttttttagcttggtgttttgttcgaggggaaatctctcgctgagctaatagatcgaagatgttcctgacaataatgggcaaaccaaaggttatatatttaacaagtgatctcatattataatgccattagaaaacaggttactgaaaatgtttttatattatccagaagatgacccctcatgcagtttatttttggagggggccatggggataccacaatggctcaatggtggcattaacactgatggtgctactctatcagggagttgcatttgccattaagctattcccgcagtacttaagtattatgataacaacaatgtgttggtcaaaggagcttttgcaaattacattcaagatgaatgttaccctgaaattggttaggcataatgctaatgttatagtccaataggccataacattatcaaaatactaatgctaattcatgtggtattgaccttttgacatttctaccagtggagacgacacttaatccaacacagctgacctctaggtgaagtggtgtaacagtatgcagaatatattcccatagctttggtccattttctggaacaaatatgtgaggttcttttcacaaatgttgttttaaaagggctttgtatgctaacaaatactgtaccaagagtagaagaagataaataaggccagggtgctaatcaaacttaataagtcacaagagggtttgcagatataattccacctttactgtgtcaaatattgcacatggatgcaatattggttccaaacacagaatcaaaagaaagaatacattttatcaattgaattgtaacagttagtttctcataggattgtaccaacttctctagcagaaaactaaatgatgatgttaagtagacaattacctttgcctagatcttgcagatgttgcttgatatctagaatacgatgcttgtgcagaagcatgctttgaaccttctgcccaatgttcagccatttcaggccttcaatatatatatgcacctaaaaattaattgaaccaaccagatacaacaagatgtaaaatgttaatgaaattgtatgatatataacagaagttaagtaagaagtttttagaacaattcttcagaaaaacactgacacaaacatcccaaaatccaacatatgaaaatcagaaaatgcagtatactccaattaaaaattagaaaacagcacatcaagagtgactggacacgaacaacctaccatttgatagattccctatggtaaccagtgtgtggtagatataacttgccacagatgcttagattatcatttgaccttaggtcacctcgcacaatgttcttctgtttgagatattcacaaaattgtactacagaacatccagctccagcagcagtgctgccaaaggcaaacaaggtgcacacatgcacaatagcgagatgcagcaaagaaaatgcatctcaaattatccaaagcacggtgcactatgcaagtcatgctctactagcagccaggcgctaaggcaccaaagaacatttctcatcaaaagactgcttagaatataaaaccaagcccaactagaaacggttgcttcaaactaccaagttttagtgagtctgctagatagtaagaaaatcatatttatgacataatattgccaattttgataaaaataaaagtgacatggcatgctatatatattcaacggtttagttatttctagtaggttaaaagagctaaggtttcatctcattagattttattttggtgaactgtgcactcgttggaaatactctctgcacatgatatttcagggatggatcacatctttttgtgctttgagctgtaggcaattatggacctagcatattaagtgtaaattttgcaaacaggcttgtacagcagtgtgcatattcattaagatgggtttttcattgaaaaatttgaaaacttgtcatcaaacacttgctctttaagtttattctgcatatgttgtgtgtttcagggatgcttgccattgccaacagatttcataacacatttgatgtcctgctcttgtgagttaagaatgcatgggaacaatgcaaacaaaaagaatttcaattcttacttttggacaagtacaatttattcattggtaaaaacatggagagcaagtcagtccaaggaaggcctacattctgagctcacatcctatgccaaaaatgcataaagcaaggatagatcaacagctcagcaatgaatcattaagggtgtgtttggttgcttgcattttcctagcctggctcatctctctcatcctggttgagtctagcctggatgaagagatacacatgcaactgtttggttgtttgcatcagtttagcccggttgggatgagattttgtttggttgagtgcatgagagatgcggtttggaaaagattttgtttggttggttggatagatttgagtctagttacctcttcatttagttgggtgaggttacctacaaaaatttcaaatctagacaataggtataaacaatttttcacatacaaagaataatattggcatcaaaaatcacccggcattctctgcaccaaaagtgaaatttcttgagttctcaaaaaataaaaagtcaacaaaacttcctccaccatttgatagcaaagcgctggaaaaaaaaaagaaaaaaaaagagagagaagcgtttgtcctcctccttgttgtcgaggagatgagttcttgcctcatcgccgccagccgttcccagctcctctgtcgccggccagtaccatgctcctcgctggcctctcatcctgatctgacatgcgcgctcctctgctcttctctcagtagaaaatagaacagagaaaacaaaaaaaaaaaccctcaatctcatcgttgacttgcttcatcggcgctcccagctgctcaacgccaccatggtcaccggatctggtggcctggcggtcggagaaggcagttgtggcgacagaaaagagaggcagcgcatcgacgcgatggagatggcaagggatgtaatagcggcagtagcttctccactggggtcggccgagggagctcgaggtcagctgccagtccaccaccggagaagacgccaaacgagcggtgaccgcaggggatttggtggcggcagcggcaagggagagaggggaagaggagagcaattgagaatgggaagatgaaaatgagagggaggaggtgagcggatgctagacccctgccacgcacgtgcacgcactgatgcaacgcttgcacccgcgctgcatccaccttgcatcgagtgagccaggctgaggagcgaagaagaaatcggccgtttctctcgggcctggctaacctacttttgcatgaactcagccaggctccaaagggcatgcagttaaccaaacaagcggacgcgtctgcatctcccatgcgagccagggtagatccaggcaaccaaagagcccctaagactaccaatatggttcatatctgatatgcacatgaaaggaaaattgatacagtaatacaatatgctaaaacaaccagaccgatgaaaacaaaaaagttagatgcattgccacacaccaaaaaactaccgtatagattcctataggggtgaaagagtctagcggcgaaccaccaagatcaaacccctacagttagttaacatcatatgccaactgccaacatgccaaaaatacccagcttacaagtcaaaacagctccacaagaacccaatcaccatgtaacccgatctcgcctcgccttctacctcgagcttgtccgcttggggctggcggatgcatctaggaggctaggatcataggaaattcaggaaccctccgcacgcccaaaacagaacatatctgccacgaaccctacggacggattgcatcctagcatcgaacaaatccgggggaccaatccaatctaatccaatccaacagcgcactccgacaacgaatcgcacgggatcccaaaacaagtattccatttctcagcggggcacacgcggcggaaccaaacaatcagaagctagggcttaccacgacgaggggatgcctggaaaccgggcggatctggttgcccggcggtgcggagaggcaggggggacgaggggcgggagaccgaggccgcggcaagggaggggggcgcgggggaacggaaggggtcggttctgcggtcgccggcgaaagacgccggggagcgggcggcggcggcggcggcggcgaggtgggggtgggggggtgggggggggaggaggggatggggtgggggcaatcgggtgcttttgccctcgtctctttttctcgttgcgcttaggacgctttggtgggagggcgtcaagagcgagtcgagccgagaaaggggagacgacgcggctccaccgtggaaggggcgatacgatagcgcgtcctttcccaccgttggatggtgggcatcaacggctctcttttttttctttttcgatctcatatggggagtatattttagagaacgctaaccatattgtgataataaaatatctatatcgggcttttttccattaactcgcttacacttgtgactccctctctcttggacccccttacctttctcccacactcacacaggagggcggcggcgtcccaaccttcgtctccatcgacattgtttctctggtctgccgtcgttgccgccaagaaaccccgagcgccattgctcccgcttcgtcggcattgacatcgtttctcccacctgccaccgctgggcgggaatcctcgagccttgtcgcccctgcttcgtcgccagcgatgtcgtttcttcagccttgtcctccgctagtggcaaagttgtttcagagctctttagtttggcctacccctcctctgccatcactacaggataggaagaagacaatgtattttttatgggtggtatattttgcgaattttttaatgtttcagccaatgtatcttgatgtttttttttgtgttggattaaatgttgcagtgggattttttatagtgtttcaatttgtctctgattcttgtggatttgttgatgtttcagtaattgaagcttgatgtttcatattcaatccatggttcaaccgtatttcatataaaatatgtgttaagatagtggtggaatattcttccacaagtactggaaatagagggctgaaatagcgccctctgtatgtttttctatatttctacaacaaaaatgattttacatgagtgtaagaccagtgaaactgatattttcctcctcatagataaaaattcaattagtaatcaataatatttgctttctatactatgagcacacttataaagacagatatagtagatacgaattctctaaagctttggcttttttctcgtgacatcctatgtatgcatgtgatagatatcctctaacatcaaatattatcaaatattatgtctcatcctcgtcatcctctagtttttaaaggctatagctatgatggtagcatcggcaagttaaaacgaactacaaggaggtaaatcgtggatttgtatccttgtagacttgaggatttgttttcatgattatcggcctgtagcctgatcatcagttactatattattaacgtggttgttcatcaattactatattactaatgtggttgttttagcatactatatacttactttatgttaatatagtaccatgcaccgcgtggtatttttgaacaagtagctagtagctcgtaaaagggacgaggtacatgctctaagatcaaaagggatggagagtataatggcaagtcattagaccacatttgcgcaaaagaagtatggcaaaatgtgctgggtcctttaaccctatattagacatgctcaaatgtggagttaagctcaacttagggatcaggtggaaataaaaactcccaaacccgatgttgggacaatagaagaagctttttctcatgtgcaccatatatctcgctctcggtcacaaacactaccttgaacatccacaacaacataggaatcatgaacttttgtgtcatcaggccaaggaattcttcacagcacgaacatcacaggaatcatacatgttcacctcagcgccatggcactccctttccctagaatgtctacctgcccacttcccttcacttccatcatgtcttctacatgaaaacgaccgtccatctcatgcaggtggttgcagttaatacacaaatcatggagaagaaaagcgttgctacaacataataggaatttagaagttgtttgtcaaattctattggtccaacctttagagggtagcggagtaatcccatatggaaccgaaagggtcaccatgttggatcaaagacgcaataagaaaccaattcaaatgtgacaattgaacattgtgaagatccagcttttttaatatataatgattaaatttggatgaagggagtttgaatatagtcacctccttctaaggctacgttcggaacaattgcctaacttgactctaatgttttccatacacacgctatccaaacggttaaacaatgcattttttaaaagtaatatttatagaaaagtgcttaaaaaaccatattaattgattttttaagtttattaagctaatacttaattaattatgcgttaatggatcgtttcgatttatgtgctagtacgaaaggttgccagccttagcttagggtgtgtttggatggagggatttgggtggataggacatggcggcccattatttgtgggtgtttggttggtgggcggaagtgggatagggcggcccggaggggaatattccctctagatgccggatggtggtatctggccgatttggccggatggagccgcccgagcgctcgggtgagcggggcgagcgacgacgtgggtcgtgtcacccttctcaccatgcgaaacagcgatgtgggtaagcggcgatggcagcgggatgaaggaggcggcggtggcagcgacccggtgcacggcggcggcaacggaataaggatgaggggacggcagcggcaagcccaaaggcggctgcaacgggaggaggaaaggagacgacgacgacgatgacgaccggtggggggacggagacgacgacgacgaccggaggagacggggacgactgtgacgaccggtggggacggagacgacggcgacgactagatttggaggatacggggcagcggccggtggggaaggagacggggtggcggccggtgtagaaggaaacgacggcgacaaccggatctggaggagaggtgagacgagcgtggcggagaccggtggggaaggaggtggggcggaggccagcggtcgagaaggcggggcggcggccgtcgagaggagcagggcggcggccgttgagaggagcgggcgaggcggcggccggcgtgcaagaaggtgaggcggcggccggcgtgaagagcaagaaggaccaactttttttctttttttctcctttttccccttttatttctctttagattttttattttgcagtacattgataatttttagtttggtgaatttgaaggggtatactcaccacctctaatgatgaggtgattgtaaccactcatccatcctactccttctaaccaaacaaaaaaatggatcaccaaatccatcttcatccctggaaccaaacaaaagactggattgccatattcactctaccaaacaaaaaactggctcgtcatatcccatccaaccttgactgtgaaccaaacacaccctaagcctaaatacttatacaaatttagttctagttttctccttctaaatattatacaaatttattttgccaaaaagtctcagctgtccattaattggatgagtggctcacatcactcgcagtatttacctccggacgaagaagaaatcgccgccaccctctccaaaaaccctagctttcctccccctcgaaaccccaccacaccactgcaacgcgtgcgagcggcggcgagaggaaggaggagaccgatggggcggccgtacgcggtgaaggggcggaagaagaagcggaagctcgacgacggcggggcctcccgcgagcccccggtcgacgaagaggcggcggaggagctgccgccgccggagggggtggaggaggaggaggggaaggaggaggacgtggcggcggcggcggcggccggggaggttgctgatgggctacccgtcgtgccacggccggtggacgggaagcggcggcccggcgcgatcttcgtgctcgagagggcctgcctcgaggtcggcaaagtcggcaaggtatggggcgaagcttcgccaacaaatttattacacctttttcttgcgcttttttttcgaccaatccgtttctggctttggatgtacagtttggatagttggattagttctgttcttatgcttatcttgataaatttgtttgcgctagaagataattcagctgtatactttgttaacgagttagctgtattgtatctgaacatatcattctgtatacctgatgattgaggagcttaatgctacacgaatgatacttttgacaattctttgttagctatattgtatctgaacatatcagtctgtagctctgatgattgaagagcttaagctgcacgaatgatatttttgacgattcttttgactctttgtgtagactatgcaaatcctgaactcggatgaccatgctaattatttgaggaagcaaaacaggaatccagctgattacaggcctgatatcattcaccaggtatttcgaatttcttgtatttccggagctcccagggattaatggcacatgattaaagcctgtcctctctcacatctgtacaacccctgtttgaaactgaacgaaagcagacatccaattttctgtttgaaatcattccgtaccacatcattatctgtgttctattttggcttcccctattgaggatatatacattccatggcatttacctcctcacttttgggggctaaccacagaatggcccctctggtaaaggatactacctccgtcccaaaaagaatgttattctggctatgcatctagacatactcttatcaggtgcatagttagaaatgcattctttttgggacagaagtagtagctgatttctgtagttggtgctgtgcacataacaccagaatgaagtcattcttgaaagagcctcgtggtgattttacaaagaacatctaagtgattaatgaaaaagaaattgttcaagccagtcattcatttctctcatttgttttatacctgctttctcaaagccaacataatttgtattcttaatattttgcaggctcttcttgcaatatttgatagcccactaactaaagctgggaggttacaagctgtttatgttaggactgaaaagggagtattgtttgaaatcaagccttacgtccgcatgccacgtacattcaaacgtttttgcggtttaatgtgtaagttaataatggctgtaattgcacatatattgtgtttttagtgttttctgtgaactgtgctgatgaagtatttctacaatattgcagcacaattattgcagaagttgagcattacagcagttggaaagcgggagaagcttcttaatgtcattaaaaatccagtcacccgctatctaccagttggagcaaagaagattggtaagaatccatattcttttagtggtagtgttaatcttaggtataagtaaatccagagttccttaaactagctagagtaacatcctaaaatcatctttggttagactaggattaaatttggatgacagaaaccaaaattttgagaactgaatgtcatgacatacaattttccagaacctcgtttactagttttgtgtagagaatttctactcatttttttcctatgagaatcacaacataaagtagtatttgtaaaatatacctgcaaagatgcacttttagctaggtcaaatagtataattcgtgacccaatgaacatttagtagcacatttttcttgatcagggcatcaggtaatggtccactgttggttgttgctaattcatgagtttttttatacttaggtctttcatatagtgctgagaagtcagtcaatttgtttgactatgttgccaaatccagtgacgatgtaccccttgtgtttgtggtgagttaagctatgccgtcgagttgatttattttttgttccattctttcttcctggtccatctcttatagtctgcacatgatttcaggtaggtgctatggctcatggaaagattgacaacgaatactcagatgattacatacaaagtaagttaccttcaattaaaattagagttagagcaaacagtttgcaggatcatggtgatatcatctatttgctgcattcttttgttattgtctactccctccgtttcatattgtaagactttctagcattgcccatattcatatagatgttaatgaatctagacacatatatatgcctggattcattaacatctatatgaatgcgaacaacgctagaaagtcttacattgtgaaacggaggaagtagctgttaaaaatattattacataaaggtttcaagcaagttgcatttatcatatgctcgctcatttgtaagacaggtttacaatctagctctgtaacacaaatgccctgttgcctttcctgagatgcctggaatgttgcgtgcatttactgtctcaaagatgttttctttagttcgtaaaaaaatgtttttcctttgtgacttatgtaaatatagacagtctcagatttttttttccttttacttgtgttgatatccattgtcttcagatggtttcgtttgactcgtgttgatattctgcacattgttcttgcagtttgcaattaccctctcagtgctgcctgctgtttgaatcgaatatgcagtgctctcgagcagaagtggaacatccagtgaaaggaaattttgaaaacgaacactgaaaaacattatgtgaaattgttgtgtactcgctagctaatgcaattttgcggtctcctcccatgctgagtgtgtactgtattctgattgtggagacttgaaaactccggtggtaatagtgttaaagttcaatgtttgtcgcaacaatatgttacatcttgaggcatactgttgcttatgattaccaccagccttgagctaggttggttgaaaaccgaactgcaacgtttgtcctttgccccaaaattttacgctgagctgagatttacccgcattaacaggaccatttcactcccgagatctcatgacaagcggttttttcgtttgattccttggttttatttatacttctactcaacgcttggtccatatatatatagtatcacagaaaattttaagatagtgggacagttcaatcatgaatcagatcttctaaaataacacaggaaccataccagtcaatgcctgcgagaatagaaaaatggttacggttgcataaaagcaaatgctttagctcttcatgttcagtccagcatgatagaagaagacattgcaatctctagagctgtttggttcttacccaatcttaataataccaaaaaaaaaagttggcaatccaattaatttgttgccaaataattggcattccctttcaaaaaaaaaaaaggtggcattgccaaaatattggtaagcaaattgaaatgtagtgtgaacacatttccaagtggaattttggcagcaaaccaaacaaccctcaccaaacattttcatcaggtttacattgacaatgatccaaacattgttctcaggatttggcaatgccaacactttaaacaggtttacattgacaatgatccaaacaagcttctcaggtgctaggttttgctgaaattaccaagcagaaagaacactcgatgcaactacagtctacattacaagtacaggtaaaaaagtggatgatccttgttatattcacaaaatgttccacggtaatgagttcaacggccaaactcgttatttcatttagtgactacgatacatacttacaaccgggcacaattcgagtaactcgatcagttattcagaacttctttaacttcacagcaagcttatcaaggtgaaagtccatgatctccgagatggtctccaagaatgtctcctcactagttcctggaaggatggcatcctctgcttcctctatgatggcctcgatttcagattcttttttgactgtttgcctgcataagatgctgccgatgtcataaggcgttaggcctctctctgcccccttcttcaaaagcattgtgctgatgcgcagaactcgggcacactggggagatagcgcccacccgtggaacttgagaagcgcaatgtctttgtcagcatctagtgatccaatgtatgctgcggtttctggaccgaagggttcgcgggcttggggccagtagagccactcaaaggtacaatcttcaaactgcaaaggggaaaaggtaaagactcgtaaactggtacagaaaaattgattgaactaagcaagatagcatacaaggaattaacttgtacaaaaataatgccagctaacaatgattcaaatcaaatgaatattaaggacacacggccttgtttactggatcagtgccgaaattgtcacattaacatagacaaaaacattgagaaaatacgaggatattactgacattgtttaaacttccaacaacactaaataattactagggatctctaattactatgctaaggacaaaaatagcagtttaagtttaccaattcaagcgagtgaacataaatacaattgtttcacatgatagcaatgatcaaataccttctctggcaggcagtacccatgatcaattggaatcaacttcaagtgatcttctccatcttggcacactaatatgttcccagcatgacgatcagcatttgccaacctaatatccagtatggcaatcttctgaacctctttaactgggaaagctcgagggcccatatcctcacaactgccattgttatctacaaacagctgcaatgatccaaccttattagatcccttccccatatggaaacaacggaccaacgctgtgggtggtacaccagaaaatccaggaacatcacacgatttacatccataaactggatggtcaagaatatatgctgcaacctcccttaatgcaccttcccctactcgcgttccccttttcaacccctcaccatcagttgacaaaggaaggcccctgggattattctttgccattggttcctcatcaataggcttgaatactgcaacattgctttcacctgaagagtccttcatgaaatagactccccctgaaccctctgttgacatcacgggaaggtacccgttttctataccagaaattgttgagtagatcatttccatcacagcaggagacaatttcacctttccattagcaatgattggctcaactggagcaggtttacccttagctggtttcgcaaggttcaaagcatctgtttggaggttatcattgtctttgggagtaacaactgtaacaacagtttccttatcaccctgctgtgtctgaacctttgctggcctgcggatgaacaagtggataactgcagcacccttcttgctaatatctgcaatcaattggttatcctcaagctcttcaccgtcaaacacaagcctttggtccttgagactcccaagttgctgtccactctcagctgagagcttgtccttgagatacccaacattgcagcaactctccacctggaactgaaatttcttcccattggcagtctcaatgcttatcgcacggaggtcagccaaccgcacgacaagatgaagcacatttccatcggtaagtccataatccctgacatgggagttgtttagtgacagctcatgcccactgaacaccagccgctgcttggtagtgacaaagcccttgaactgctggatgcggagcttgaccgaggcaacagagtctgagtgcaggacacgcattggcatgggtgccacccctggcatggcaagaaaaatgacaatagaatccagctgctgcaaccggggctcgccatggggcgcaaaacaaaactggtccagcagggggctcagtgtggctataccggctgacgacatctttgctgatctcaagcaacacagccaaggcagccaaagctactgatgcaacaagcacaagtgcacagccaccagcactagagaagcagctatttgcactatgaattagtggatgtgacccattgatgaaaaaacaaaccctagggtctcctatcaacaaggaaaccctaggggccaccgcttgacaccaatgcgcctataatcccttcttggcccccaatgcgttcaaccctgcacattcaagagaaacaaatcatcaaaccctaggtgagcaatcgtggtactcaaagcagcaatttcagcaaaccacatagcaacaatctgagcatttcgcacccgaaccgaaggaatcgtgcagaggcggcaggatcgtctctgctactactccaatggcgcagcagcacagcatctgtagaagttcaaaaaaaaaaaaagaagaaaaaaatataaatcgagtaggaactcgagttcggccaggggattcgaacagcacaagcaacagagagacccctcaccggaattgatataaacagattggatccgaggaggcgcgaagacgaagcctcccagcctcccttctccgtctccgcctccgcctccgcctcggcctccgacgggccgcgaacccccgcgagattccgcttccgaagtcgcgcagtctacgatcgatcgccattgccaacacgcgttagaaacacaaacccgaatccaaaaaatcgcaccacttcctcatcgatcctacccatcaataacacaggaaccaaatcgctcccgcgggagggagaaatcgcggaaagtgaatcggagaacgaatggatcatcttaccacgacggcggaggcgcggattggcggtggccggagccgatcaactgctccgcccttcggaagagagagagagagagagagagagaattgttgaaaagaaaaagaatgggtgagggtttaattgggcgaggtggtgtgggtttagcttagcgtggtgccgtggtgggagtgggattttaacttaagtaggatttggatttggatttggagttggaaggcggtggctttggcttcgggttgccggcttcgtggggaacacgttggaaaggagtcggttactgtttagaataagtaactccggtaattaattataattattaattaattaattgtctgtttgtttccagtaatgaatgacttacaaaaaaagaaacccggggttgcaacttgcaagtcaggccaacggtgagctggggccattaggtcctactgtatttcgaatttgaaattttatgagcttttataggctgactatttctgctagttaaacttatttaagtttgacaaaatttatagaaaaatttagtaatatttttaatacaaaacaaacatattttatattaaatattagttttaataaagctaatttcatgttttagatgctgttaaatttttctatatttaaataggaaaataatcaaaataacttataatatgaaaaataagagagtagttgacattagacattgctcgtttcaaaatcgctagtagatcttttctgaaaataacaaatactttagaagtttttgtaaaacacgaaccctgctatatgtacaacttctacattcgatcggtgtacaatcgaaacggcaaagcagcacagtacatgatggcgtgaggcttcatgtgacgtatagcatgttgctgatgccgcgtacgtcgttgtccaaaagtcggacgctccggtcgtttgtatattattttcggtaaaacactttaatatgaaaatggaggaagtaaactcgggtatgctccaacgctcttgacggtggtactctataacatgcgcttgtgaaaagtgaaaacccaagttgggttctaattctagataaatagaaaaggaaatataagaattgcgttataagggaacatgaagttttttccgattggtaataattgaatagtttcctatgaaaatggtaaaaaaaatcttgtgaaacttcggagttacaaatgatacatccaaaggtgtcatattataagcctataaattatgtagatcgaaatgtttacaatgcaaccattgcacaatgatccccaaacaaggattatataccaagaaaacaaatattacaacgattgatttctaagcctgtgttcgagaggtgaggcccacacacgcaaaacagagcgacgcattttcttatgattaattaagtatttaatattttttttaaaaaatggattgatatgattttttaaagcaactttcatatacaaatcttttacaaaaacacacagtttaacagtttgaaaaatatgcgtgcggaatacgtgggaggtgagttgggaaatgtgggggaagaacacagcctaattcttctttgctagcgcttgaagaaagtacataaattaaatgggagaaatttgtaattgattaggaagaaaaagtaggtgaagaatttgaatggtgaaagattgtgattagttgataatggaatatatgtggtgaaattattatattttagaataaattttaaatgctaaaagttgatatattttaagacactaaagtaacaagcaagttcgcagaaaggatcttgaaacaacaacgacaagcagtcaagctgctgccaatgccatggatgttcctgggctcctgtgaagaattctagaaaatactctatccatcccaatatataacaattttggactgccaatgccatgaatttgaagaatgatatgtccagattcgtaatagtaggcaaatccgatactaggctacctccttcggtttgtcacaaaataagttatcttttaataatcattacatcgaagtttatgaaggtaagagataaatggattgggagtaaacaaaaggagaaataattttattgagatttgataaagtgaaggtattttagtttttgtattggtacgtgtgagatgaatgaagaataaacttattttagggttggaagtataaacttagggttggaagtatgtttatagtttaagtcttggcgtaaatattgaagacgaccgactagttgaaatcgtggatacgagttacgaccggcacagatcgatcagcatgaatcgacaccgaaggtttggtttggccagtgcaacctgtaacgttatgtactagtgctttcctgccgtaataaaaattttcttgattcctactggaaatataccacaaaattccggcattctagagcagcagtaattacattccacgtcacacacaccaagctgtgggtgaaagagaaaggcaatgtgaaattaacatctatctgccatccttatcacagccaaaagaatcatatccctggagtctgcggataactacagatgatgatgatggaaatgaaatagcttcaacatactgtaacaacatcccaagtcatgcccacagcgagcaaaagatttatacaccacaggtagttctctctctctcttcctctcttcacattcacaggttcctctctacaaaatcccagatcctctcttccatatagatccggtcccctaaccggcgcggcatgtgcctctcgtcggggaagaggaggatatcgtagggcttcccctccgccatcagcgagttgatgagcctcgccgtgtgcctgaaatgcacgttctcgtctatcataccgtggatcagcagcagcctccctcggaggttcttcacatgatgcatgatcgacccgtatctgtaagcgtcgcgctgctccgagggcagacccatgtacttctcggtatagaaagtgtcatacccatcccatgctgtcaccggagcgccagaaactgcacaactgaacgtgtcgggaaatctcgcgaggcacattgccgagagaaagccaccatagctccagccgtagagacctatatgtccgggttttgctaggcctttctttattagccactcggcacctgctaactgatcttcagcatcgacacgaccgatgttgtatttgagctgtccctcaaactgcaaaccgcgtcttgcggttcctcgattgtccatctgccaggagacagtcagtcattcagtgttacaaacaacttgtattgccatggctcatgagcccaatgataaatgtagtgacaaatgcggaaatatataggcatatgattatactccataatgagcaatcaacaaatgcggaaatatataggcatatagcagccagcataaatttatcatatatgaataattctaagcaaaaaaaaaaactcatgtaaatatatgattatagaaacatccgttccaaaacattttgcttccacttcaaaattcccaccttaaaactttagattatttttgctcaagaagcaatatggttagtcatgatggattgtatcatcaatcttaccacttgccatagtcgctagggatagggggtagtataattgtttgcttgcaactgacagacattactacaataaaaaatattggctgctggattgtattgggcttttcaacccacacgtcacttaggataattacatggggcttttttggacacttgtaatgttttgctaattcctaatgacaggaaggttacaggcgccaatattttccagacatagttgtggacgcaggaacccttattagcttagtggagtggtgctaatatttctgactcaacgcaaattttatgcttgaatgcactattgcattatctgaggttgagtccatgttaactctcaaaatgacatactgatgtgctttggaaaaattaatggatgagatgccatgcattgcacagcataccttgttaaacaaaaagaaattaaatggtgctatcttggccataagtttatttaaaatcatttttagtttagaattttacccatgcaatgcattgcacagcataccttaagattggtgacattatggaccaaagtgaaaacagaaaaaaaaaatcctcaatcggaatctatcttgttaaacaaagagcaaagaaaaaaaaatagaggaaagaatagttaccttccaaactaatatacccttactacgcaggaactgagctctcatgtcaactgtacttatccatgagtcacttacaagctggacactgggaccgccataaacgttaacgagtgttttgtatgggggtggtccatattttttctcatcagggagataaagagttccatataaagcagtcccatcctttccttcaatctgtactatctctggagacagctgctgaaactttttaagcggctgaacagtcagaggctgctcatatagaggcattatcacacttccatcaagcaaagagcatagcaggatcacaggtggagattttattgagtcatacacatcaataaacctcagcaactgatggtcaagaattactgaatgacgtcctgtgccatgagtcaacctcttggggacttgcaagggaaggctccaatccggaaataggttggtggagtaaagatttgtctccaatggcccatccaatgtgcctgtaaaatatataactccagaactctcattgacaccagcaatttggtcgatcatccaatcaccttgtgtgaggggccccaagcacacaccattcttgtcatgaagatacaggtgtctaaatcctgtcttctcactggcccaaataaatccacctggatgtttactattcactcctttatccagaggagtaaaacaatcgtgcaatgttatccacgtatcatgctcttcctctagtatgacctcccttttacctgaagcgatgtcaaacttaagtagcttaagttttgagtgagttctattgagaacttgaacagcaatagcactattatgcatccagtttactctagcaagatattcttcatcaccatggatactatttggttctccacataggagatccatccaagttatttctcctccatgggaagaaacaactccaaggcgcactttgacattagcagcccctgcaaaggggtaagcatgatcttcttgagcatctggaccaaccgaacttttaccctggtgcataattctatacagtgggatttcagatgagtcaacttcagtaaatgcaaggtgtttgctatcaggagaccaccagaatcccatcttcctttccatctcttcctacaatgggagatacaaaatattaggcagcagccatcaaaacaaattccataccaatcctaatggatcaacatgtgcacctgtgcaatatactcagcaagtccgtggatctgggaaaaaaagaaacaagtacaaatgttagattctgaagttgcagtaacaacacatgatgtatgatcttgcatactttatttaatccccggtatatatttctgttgatcatgcaactactaatgcacaactcagcatgttttgaatgttagaagaatactgatagcataatatacatgctacatgggtaagctaataaaaactatgagatattattggtaaaggggaacataaagttcttttagcaggcaagtttatcctagaagcttatttgagccatagcactaatggcggcagttaactagaacaccctctaaagtttggttaaaagactaacttataaaacttgtagtctttataaacaccgccagcctcctgcaatagtttcggctgctgtgtgtctttggaaggtaaatatcccactgtttggactttggctatggattaagcttactttggttcaaccaaaaaacaatccctaccaagaggtagaaagaaatatttgaactataacacattgaatatattgttgacaaaaaaaatcaatatattgcttagttccaatgatagtcatgttgggttacatgctagttccaatgatagtcatgttgggttacatgccaagaataaagctaataaacttctagaaagtcaacatgaaacttttctttgcaacctgctcaacaagacttggtatgataacaaacaacacaatgcacacatattcctattaaaatgtgagtatcattaacagaactccaaagaagtaccttcccactttcgcttgcaccataggtcaactgggtagtttgcccatcagagaaccccactgtatgcaactcatcatcccgcacatacgcaatcatgctcccatctggagacagatgtgggtcaatgatgggggatgtggctgaactttgcagcttgagtacaggttcagcaccagacaaatcctggaagtaaacctatggaaatagaaaagatatatttccatgaaactcatgatatttagcatccttgaaaatttacaaaggttatctgaaacatcaaaaactaccagaaaaagaatatccatgatacgctgacaacacaaaactaaccatagatgacaataatcaacacaacagaggagttttatttctttgaatcagtagcgagatcactatttaggaacatgtcagctacctaatccaccaatacaagatgcagcactataccaagaatgcaggaagtgcgatctcaagcacagacctgcaggcactgataaactcaacttcatagccatcactaacgactacagagcaaatatggctcatcccgcgacatccaaaccagaaccataataatggtcacccaacactgccccacaaaaccaataccagccttccattaattcaacactcgaaacggaaattaatgagcctaagcctatccatgtgcagttgctgatagcaaaatcagaatgtcaacctcataccaaatccttaatccgagaaagtggtccaatacacaaggataaaagtataaaactaccgaatttgattagggcaatgcgtatcatctaatactaagttactaactcaactgaattggtaataatataaatcaaggaagaactaaatgggggaaagggtttgcggtttgagagatacgaaccccagaggggagcggcacgacaatgccggcgcgggaggcgggggtgccggggaggcgggcgcgccactcgtagcgcgtgacgccgaggccgcgctcccgtgcgcgctcgcggcggaggcgctcctcggcggagaggttcccctcctcgaggccgccgccgtcggggggcccgaagaggagctcctggcgccgctgcgcggggtcgaaggcgtacacattccggtgaagcgtgccgtcggggctgtacaggaaggccacccggcggtcgtcggggctgaagctaagcgccacgggcgccccgtagcccgggagcgggtgctgcacgatgtccaggagctccacgctcggggcggcggcgcaaccccccgcccccgccgccgcgccgtccccgtccccgctgctgccggcgccgacgaaggcgtcggcgagcggcatccgggcgagctcctcctcctcctcctcccccgcgtcgaaccgcggcttcttgcggctgttcccctgatccgacgacgacctcaccgcccccgccgcctcgcccgatcgcatcgaccgaccgccacaggcagccgccgctaccccgcaagatcgccgccccaagaaaacctcccccctccctccccaacccgcgatcctccacacccaacaacaaaggcggaggagaaggtatggtgccctttgaaggcagacgaggatctcaaatccgaggcggagatcggagtggaggaggagagagagagagagagagagagaggatcggaggagaggtggagggcgacttggagttggtcgttcgttccaagaaggggaggagagagagagagaggcggcgctaattgtaagtaagtttgttgagaggagggaggcctttgggatgtctcggtttttcgttggattggatcatggatggaaggagggcggtgtgaggagggtggtgagtgagtgtggttgctttgcttgactgggtctggtctttcttgccctttgcctctctccaattctatcctaggcttccatcggttgccattttgcttaaaatggcttatttggtttattagaaaattaaagttaatttataagtaaaacttttgtagatttgttcgtagcgacttaaaagccaacattaacaaaaattacgttaaaagcatttcaaaatcaacttcaaaatcaagttcaaaaattcaaattttagcttattctttggctgtttaggccaaacgatggggctgctatactctcttttttttgttgttgttgttggataagaggaatttgtaatggttagttgtcttgaaattaactgttctgtagatataaaatatcatactttccaatgattggatctttcttgtctcgagatgaatttgaccaaattatcttccatgtgcttctttttcgtctttaacatcctaaatagtctacctgtcttgtgttaattttggtaccatccttattccaagcacagttatttgttatgtgttttttaataacgttgatataaaccttagcttgtgtccatagttctacatattgagttttttttaaaaaaaattggttaaaagttctctaaaaattaagttatatattattaattatggactaaaattctgcaaagacacttggcacgtgtatgccaccttagtaaacatggataaggaggaatgattgcacatgcaaggacatatgtatgagagatggaactaccggtgtgtagtaatgcactaatgcgccagtatcaatagaaattaaataattccggcaatcctagaataccaaggtctggctgatgattttctcgattgacttgagccaagagcatccagacttcttcacctggcatcgggagagccctggatgctactcgatgtgatctgcttacaatgcgatgttctttgagagtgtcaacttcccaacattcctaatttgggagagaaaagcccctagcgttgctagtactttgcatggttagttgctaactgacgatgttggatgaccgattggctgagtaagcgaggtttgcctcacccagccttaagtgtgctttatgatcaacaggaagaaacaattgatcacatcgaaacatgtatctcatcaattttggcagctgatcctgatcgccatcgggcatccatgcttctttgcaaaaaaaaaaactttcttcctctcatggtggtgtgagtgcaagaagaaagtaagcgggtagcttcaccgaggattcgacaccatcgtcactttagccacctggttgatttagaaggaaaggaacaatcgagtgtttaaccaatggcaacagacctagaccgaagtgacacgtgatgcggaaaaagatgtgctttggtgtgaagttgggctgctaaagtagcatcacaatatagtatcttggtcgcacaatggatgtcatgatagataatcttgtttacactttgtgtttatgtttgtttttctttttcacttgttggctgggttagcaagatgcacattaccctcttcttaatacaaaataaacacacatcttatgcatattctgcccccaaaaacaaataatttttgtctagaagcactgtagtttgttataaatttacaacaactttcaagcggactaatacttgtctcatgggcgggggtgctagcccttgctagatagatccggtagccttttcaaaattaaacctataaatgggagacctatcatgcacatgtgaggactaaaatagtaaagaaaaaaaaccctatgtcgattttgtttctaatttcgaataattctaatacgaatagtatacggaacgaaaatggtggtatgcacattgaggaaattcctatatttcttcctcacgcaacactccatcagcaacttaggtcttgtttgaggagcttctagtaacttctcttagaatctaaagttttccaaatactgcagattcttacctagcaatggtggattaggctcatcataaaagcccataaagcaattgaaccagcccaacaattgcatgttactgtgctacatgcacccagccatcccacacgtgcaatccccacctccgctccacccgagcctcgtattggtagttcagtggcattgtcttagcatctctcacccaagcgtgccgtgcgccaagccaaatctcgcctcccccctcctcctcctcgcccttgccctgttcgtcatcccactctccgctcccctctactgctgctccatggcccattcctcttcgcaaccattgtccctgtccccgtccacggtggtcgcacgcacgccactcgtcccggttctcttcgtgatcggcgactccacggctgatgtcggcaccaaaaactacctcggataactcacccgcgccgaccgcgagttgtacggccttgagttcgacactcgccacaacacggggcgcttctccaacagtcacatccccatcgactacatcggtatgtatctatgtatgtgtcgtccccttctcggcactatggctagctcgaggacatcctagctggtctaccgagcataaggcaaactggcgcgtgctaaccatgacagggtcccgatcatgaatttgttggcgacttcgatagggaatgatcactcttgcaatagctgaaaccccacttctccaacatgggctctcgcaccaatcttgatcaagacaacatcatgaccgcatattatggagagttgttgaaaactgatcgccaggtgtttgagactcaacttgaagaattgcttcaaaagatggcttcgtactaccgtaagacgaggcaaggcatcatcaagcaacaaaaattcatgttacccatccatgcaaaatcaaaggtaacaacgattctagcagtgcctattctaacatatgaagttgtgatggtgatgttatttctagtttaaataatcggtttacttctttgaatactacctttgagaaaacctttagtactaccttggaaagccctagatgatcacatgagtgagttagagaatcgactaaatagccggttccttggtggtgcatgtatttcatgcaacaacgagcatatgcatggtattccttcatattttcatataccaaaattttctgtacaacaagattggccgatgaaaaatacccacaattccctcgatacaatagatcctagattcactcctacgatactgtatgctggtccgaccgatgtgttattgctggtcagaccggacgcatcgatcggaccgacgggtgtaataccaccagtccgactagaggcagcagccgatccgattggagggacatcaccggtcagactacgctcggcatgtttcgtagaatcagctcatgtctggtgctcctctaaaagacattgacatgtggggtccacgggctgactcaacaagattggataaactgcctcctaaaccgttcaaggagtcaatttgtaatggttttgtgagttggaggataggttatagggatgcgattcaaccatgggcatgagttgagggaagcaaagtagacttagggcctgttcactttgatgaaaaaaaaaaccttaccaaattttggtaggcaacttgccaaaattttggcaggatttcttatatagttatcaaaatttggcagcaaattaaatatagtcacttttttggcaaatttactaaaatttggtaaggttgaaaatgacatcaaagtaaacaggcccttattacccacgggaatggtgtggggtgggctggtaatataagcccagaaaccaatccatccagcccagcaactgcgaggtcggctgctagtctaacgtgcacccaagccatcaccccacacgtgaaaaatccccgctccacccgcgccgcgccgcgcccaggtagttcagccgcgcgccaacccaagctcgctcgccggccggaaatggcgctccccttcctcctcctcctcgccttcgccctgctcttcccgctctccgctcccccgcgctgctgctccgcggcccccgcctcctcgccgcccccgtccccgcccccttcccctgcggcggcggcggcggccccgcgccgcacgccgctcgtcccggcgctcttcgtgatcggcgactccacggcggacgtcggcaccaacaactacctcggcacgctcgcccgcgccgaccgcgagccgtacggccgcgacttcgacacccgccgccccacggggcgcttctccaacggccgcatccccgtcgactacatcggtacgcgccccccaccttctcgatcggcggcgccatggctgtggcccctttgctctctcgtgaatcctccccccccccgcttcaaaggttgcaggtggttctggaatcgtcgatccgatgctgctttgcctctcgtacgcctatggatgcagcatgttgtgggtttagtgtaatctgggttttgggtttctggtatacgaaggttttgcttagttgttggttcctatgaatttggggcatctgatctcatacatcgggggtatgtggatttttgcccaacaattgctgaagctgaagagtaatcagttcatagcactctcctacacagctgaccacctggatctcacatacatagactcctgcggcttcctctccttgatctcacatagcaatgttgtgggtttagtgtaatctgggtatttgggtttctcgcatgcgaggggcttgctcagttgttggttcgtctgtgggtttctgccgaacaattgctgaagctgaagagtaaccagttttgcagcacaaccaccacagtctgggcatcatttgatcctgctgttcttagcactcctgcagagctgaccacctggatctcacgtatctatatagaatcctgcggcttcctctccaaatcagtatccagtatccaccaccgttatcagccgttgaggcaatgcattggcagaatgccagaacattaagaagtgccatcataatgtacaccattagtccatgcatccagaaaacattgccagaatcctgcaatgtatccatttgatagtcctgagtcccgaccagttgtctacatgctccagtctctttgccaccacacactgttaaatctctcttgtccaatgtccaccacattctggacagtttcaaggtcctcacaggaagcacagctgcacaacctttgttaatgttgctttaagaaagtcatatctactcattagtttctttgggagagtaaggagggaaaaggcataggaaagaaacatttaactagggctactggctcactatgtgaaagatgtttcccttcaatttcatttagctggtgttctttatctcttttgcccgtctctgtcagtacttatgtttttcatgaatcaatagtatcttgttctttcttctgtttttaaattattttttccgtgatttcttaatcttagacttttttgtgcatttgcagcagagaagctggggcttccttttgtgcctccataccttgaacagaacatgcgcatgggtgtcggcagtgtcgacctcagcaacattgatgggatgatacaaggtgtcaactatgcatccgcggcagctggcattctctccagcagtggttctgagctggtttgtcctcctaacttcccaacaactctatttcacgcttataatctagcaggaatgtctttgtgagacccttctctagaggacgaatcagaaggagggtgtttcaacaacagactagaagcaatgactcttctcatagtgtctacatcctctctagttaggaagaatacttgctcaaccatttgaactaatgctgaaagattctcctgttcggctgctcccttccttccatgtgttccaactagtgtggattatcagggcatcaaattcccttcttagttcctaggaattcatgacttatatatgcttcctaccagatgtgagattgtctacacgagacgattgatatgctggtgctgatggggggtttatttatgctgctggccttgtccaagtttgcttgtgaagctacagtgctataagttgtatggttgttttattttcctgcacgcataaagcaaaaggagatatatgtagccatctactcaaagctaatttatcataatttttttattgtctgaaactaaaaaactgcatttgttctatactatggcttttgggatgatcaaggagttagtaagaatcactgatccggcaccaatgtgatgaaattgatgtatatcatcctgaacattccattttcatatcaatctttattcctgcttatgttgttgaatctccaatctttgtgcccaaaacaacaaaaacttgtggagctgcaaatgctaattttgtcatttcaataaaacatcatggtggtgtctaaagaggagaaatgtttacgtatgaacattgctgcaaagttttcctttatgtggctatatgttttaactttctataaaggattggagcctcttggttagagtcaagcttgttgatttgcataccttttcattattcttaaatgtacttgaaactaaatcgacatgatcattaactatataacaccagtctaaagaacaccaatctaaagaacacacttaatgcttctctatgaaggtttctcttttggtatgtaatacttgctcatcggatgtatccttttttgttactattttgtctcgtgaactatacatttgaagattattttgtggtggtattctttactactgcggcattccagcagctgtaaaagtatgtgcaattatactgttaaaaaatctccaacattggcagtcccctagcttggaatctgtcgatattttctgtgtttatgttatgatttcttgcaaacatattttagattcttaaattttaatggcgtggttgttctagcttaaatatgtttagaacaagggatgtgacacctttactttgtgcagaataaaccttcatgctgatctcttgtgtatcaagccttcaggctaggggtgtaagtggctaacccgcgaaacccacttataggctaaaataagccgcgaacccgtttattttgacctataagtgggttcgcggctgacccacttacagccctacttcaggcacatgaggatcaatcatttcatagtgtgactatttgtagttatctgtatggccgtaaataatggcctctatattgttctgtattggagtatctctctactatttttttctctgaagaagagcattcttttacctatttttggttttcataatttaatgtgatgcataatttgattctgttcttttttagataaaggaggctaatttgattctgttcttgcaattgtggatgcactgcagggaatgcatgtgtcgctgagccagcaggtgcagcaggttgaggacacatatgagcagctctctctggctctcggggaggcagcaacaactgaccttttcagaaagtccgtgttctttttctcaatcgggagcaacgacttcatccactattacctgcgcaatgtgtctggcgtccagatgcgttacctcccatgggagttcaaccagcttcttgtcaatgcaatgaggcaggaaatcaaggtgtggttattgttctccagtttattctctctgtgcaacatttcttgcctccttatgattccagttttagttttttgatcagtgtgttgcatattgcccaaaggctgtagtatcgtgcttagcagtggccaatgttgtgagtatgaatttgatccgtaatttacggcccgtaaatattctgtgcttgaaaggtatctgctctcagttccaccacccagatgtgaatagttctttgtactcctggttaggaatatgtttgagaaaaggaggagtgtggacctctggggactgcagatacatgaattatggaaaactagctatgaacattaatttttatgtttcaagggctagaaaattttcaaatgtttatagagaaacctgatatagtacactttttctgtaggttaaagttttcaaatggtggatgagtttaaaaccgtgtacagttttggactgaagcttctttgagttactgaaatcctcaggctgtacagtttttctgtagttatgaattaggttaaaaggataggagggtatttcatctgtacatttgtaatatgggaaagttaactgataaatacatggaattgattaactcaatggatatttatatcgttggctgttagcagttctgtggtgttatgtactttacattctccgtctaccgtaccttagtttcagatttgaggtagtacgttgcaacgttgctcaacaaggacatacttgttttttatatgttcattttgaattcttaacattttgatcagataaggcggccccaaatctgatagggactgatgtaaagtcgatactgaatattgtcttggactgaatactgtgtttgagtcccttagttcttggtctgcgcatacttccagagtggattgtactttgtactgcctcccatttggaagtgcaagctaaatgcgtgttacttttgctcaacttgtaggacaccatgcacactaccaatatgcccatgatcttaccatgatacaaacataattctcacatcatgcataaatgcataatgcacaatttgattttctccctaatttatcccctttccttttttgaacggataattttaatttgcaaaagaattggtaaaaatggccccaaatttctattcagtaaatctttggcagagcatgcgatgcacattgattgaggctgcatgcgccatgagtttatttgtactgtccaacatttgagagcagaaatttctgttaccattgtactcatccaagttgacttgagatgttgctttcttgtttcttaaccttagtaaatcagttacaatgatgcatttttttattatttagccatatgcagttcttgtcagattagattattaagctatttatatctatatataagagttctgtacttcctgcagaatttgtacaatatcaatgttcggaaggtcgtcatgatgggcctccctcctgttggctgcgcacctcactttctctgggagtacggcagtcaagacggggaatgcatcgactacatcaataacgtcgtgattcagttcaactatgccctgagatacatgtctagtgaattcatccgccagcacccaggctctatgatcagttactgtgatacttttgaggggtctgtggacatactgaagaatcgtgaccgctacggtgagcagatgtatcattgttactactgtcagattgcctttctgtccttagggaagaactcacattacgatggaatcacattgtgcaggttttctgaccaccactgatgcctgctgtgggctggggaagtatgggggcctgttcatgtgtgttcttccacagatggcgtgcagcgacgcgtcgagccatgtctggtgggacgagttccaccccacggatgctgtgaaccgaatcctggctgataatgtgtggtctggtgagcataccaagatgtgctatcctgtggatttgcagcagatggtaaaactcaagtagaactgaaccaacccttaaactccattgtagttacttgctcagcttttgtgattttctgaccaaaaaatgaaaaacttaacaaggcggcacggagaagtgtatatcttgagagctagtaaaattttttcgtagatacagatttgtgtagaaataccatgttcatatgtgggcactgcactgtaaaggatctgtatggccaaactgcatgaggtgcttggtaggtgaacataaaacattgctgagaactcacctggtgtgcttaactccccaattctcacatgttttgtttaacttctgatacggttatagatttatggtgaaatgttattatgtgttgcagttttctgcttttctggtgaatccatatgggcaacatcaaaggtatttccaagaacacaagttttatggtactctggtactagctatgttctgttatcaactgatttatcctcttatagatcaaaacactgcttccactgcctcctactgcactaatcaacaagcagtaacatcttgtcctgctttacacggtcagtttacaaaatacagccttgcccataacagagagacaaattacaacctccatatcaacatgccccttaattacaatcaactcctcagctgaccaccttgtagcttgtttagattctgatttgcaatcctatccttccaagtgctgacagctggagctctctctgttgctgcaactagagaaactctgaattccaaagctctgtatctgaagtcctgatgctttagcaagctgagctatctctcttcccatggtttggccatactcataagagaaaaatataaggaagagcatggagagtagctgagtagccatggatgctacaactcttcatcatcaactccagagttgagaacaaaactggggaatgccattgttatgtccctgaacacgaaaatcgacaaggcaatacatcagaatttcatttatagttgaaagcaatgtaaaaggtaactacggtgaagagaaacctgaaaaattgtagatggtacttacttcaggtatgggagggtcatgttcttcagcaaagcagggtttttacttgcgaacgccttccattcatccgggtcgatcttcccgtcgctgtttaagtctgcttgcttgaacgtctgtcaaaaagtagcataaattcaaacttcagttatatggggaagaaataaattgagactagtattacatcttcatgtgctttacctgatccacaatctgctcaacagcgtcatcagaaaggagcagatctgattcattcagaatggcgagcaccatttcgtacaactgcttgattcataagggaaaaaaaaagaggtttcagtaactttaggattttctctgtcaaaatgaaaatgcagtacaaatattgttccgaaacaatactttgtatctccagttttccacgctcagcctctggatgttttaggatttaaacaagtctttaacagggttcaatacatatattcttcaccatttatacaaccattatttatgcatgttttctttgatatcgccaagaaaactggtgtaccatcgccatcagtactgaaggctagctatgcatggaaattacattatgttttgttatttctacaaaatatagccaattagtcatattctttagataatggaagctttattgaacccagccaattacacatcaaggtgttcaatggaaagaattaaggatattgtttagtaactcaatatacctcttcacgttcgatgtatccagttcctctcagatcatacaatctaaatgcaactgcaagagggaatactgtcagatgccaaaccaagaagtgatatatgaataaaatgaagattgatatgacatgaacagaagacaaaatttgactgcaaacaactccaggatgttgaaaagcaaatcatgacaaaagatgaagatgattcttggcttataccagaatactctgaccaactaactgacttatttctgcttctatcttttaaaaatccttgattaccagcaagtattgttttgaggtagttttaatattagcgactaagctatttcttaagacaactgagaaaagaagattgtaattaagtacaacttaaccatatgcaatgcaatgtggaagggctgaagtagggtatttcttacaggcaatcttctctgccaaaggcgtttccgggtgaaaaatgttgagggatcgaacaaactccccgaaatcaataacaccattgcgcttaagatcaaagagatcaaatatctgcttgaaatgagaagactctgtcagtctttcacacatctggaattgttctataatttaacggaaaccataaaattgtgcttaattagctcagaaaagcttttgcagtgagacagcaaaatactcagaaattcaaaaaaggcaaaccgacccgatcggcgaaaaggttcttcttgttgctgttcctgaagagtgctagctggaactcctcctgttcaagaaaatggcagttcagaattgacaaaataccagaatttcaataccaaatggtcacttttgtcaaaaagatggcctccattaaaaatgaaattcaagagagttaaccttgtgaataagcccatctttgaatatggaatggcttatcttcttgaacagctcatacagggcctccacctcactcacagaaactacaagacgtaaatcacacaggagaaagcataattaatcactctccattcctgaactgaagaatggtgtaattcagtgagttcttacatgtggtctctttggccaggatagcaggatcctcatgctctgcagctcgtttgaactgctttgatgatatgcagcccatacaaaccacacctttatcttgttgttaagaaacggctttcctgcataaagtgataacagtcacctcaaagaacaggataaagaggctgctaacaaaaaaaagtgaagtgacatgaaaaagttaagtgaaacattaaaaacacaagaaacacagccaaacaacaagacctcctttggaacagaggaattagactaaatcggatgaaaatcccataaaaattcctgcgttccaaaggagccctgaatcgacaaacacagaagaattaatctcacctagggaagaaacagaggtgcctttgaacttctggacatcaagaagaagaagttgatgagcaaaatagagggggggggggggggggggggagtgtgtgtagctagtgtgtcccaaatacctccaagcttattgcagatacaatggacatagaagaagaagatggcacatatatttatatatgcacatgcatagcaagcatctgggctccacagtgtggcacagccccagctgtgccgaccgtgtgtagcaagagttgacttgaaatggttccctgttacacgatctgcaacattaaattattactactgttttatattgctcaagttcagcatctgtcattgctgaaaaataatcagcaatggcgggaatagattaatactagtagtttacagtgtgtatctagcctagatgtagcaatatatacttgttgagtaatggaccataagaacgacggttttgttcttagttaagtgatgttaactaggccgtaccaaagatacatgcatccaaaacgggcgtattgtgattgatgtttaacgaaaaatgtcaacgtcgccttgtagctatcaagcgtggttttttttatatatatggaaggagggatccaaaggtgacgcatgctcttccgcttaacaagggatggagcgcctgttcatcaaggacctaattttggcgttattttctcccgtctaccgggaggtactagtactgggaggtacaaaatcaaatctgaccatctatcgtgagagggtacaattgagaaacacagaagagaagcgaaaccatctccggtgtcgcgccaccgctttctcatctgtttaaagggttcgctcttctcatctgttcagaagaattcggtaaaattgtaaagaaattgaatggcacaatttcctgagtgccttgtagttgcagacagcagcagaatgtatagtaagcagaactaagtgttcactgttcagggcttcagacaggcgcttaggcagccatagtgtagtggtgcaagcgcgcgtttataagaaatgtgtgtatgcacgcgtatatgagtgcctacattatattatttaaataataataataaacgtctggaacagatatcgttcaccattatgttacatttagggggacatatatgtgaaaacaagctagggggacatatatgtggaaacgagttaagtgttggaaactcatgaaaatcatacctaaaagttttgtaaattcataaaaaaaactaggaataggtgtagatatgaaatacattctcattaaatctcaagtttaaactcaacttcagttaggagtaacaaaaaagacaaatttcaggtggatggtacaagactatattcatccgaaatttgtctttttttttctcttaagcgaagttgagtttggatttgagatttgatgataatgtatttcatatctagacctatctctagtaatttgttcatgaatttacaaaacttttagatatgattttcatgagtttccaacacttaacttattttcaccgttatgtcctctatatttagagcacgtgcattgttactttttaggggatctatggaagagagaaggagagagtccactctatacgttgcatgatttttctaaataggtttcaactttcaaggtagtaacaagtactagctatggcaccgaatttcaaaggagatagagggtacattccactactcatgagaggaagagatcaatccttaaatctacttttaataacaacagatctcacccgtaacacctttgctagttctctacattatagatttcttaacgaactactattctcgtggtgaatctcactcgtagcatcttcgctggtcctacacacatcaaccatgctcttagagcaagtttaatagtataaccaactactacctccaatttatctatagccattctaatagctcgttcatacaatagctacatactatactattaatacacggtcccacctgtcgtgtcttgaagtccgtgctacagctggctataaatctgtagcccgctgcccttctctcttctcatttatcttcttaaaatatgtttgtagctggcttatagcatgctattgtacctgctcttagctagtcactcagttagagagacaggagggggagagaaatggccctggcggcacggtggcgtgctgatgtacgaaccatatataggtgtagtagactaagcacaaggttcaaattaaatttgaattagttaccccggtaaaagcttgttaaaagtacctacagaaaatcagcgtaagtctaagggtaaatcaatggagaaaaaaaaacagcatatataaatcgtgcaggatttcgcatgaacagagtgtcaggcacgcgcatcagaaaccatatcgacaatgacgagctagccgacgacagcgattgcctggctgccaactaggatatatataatgtaacaagaaaattaattaattgggtgagatcgatacgtgaaacatgctgattaattatcttttaatttggtccacttgtagtaagtttgttgtgaaaaccaatgatttctaattatcaggggaaagtgaatatattaacattgcccgtggaactcgaatcttgcaaaatatttggcagggaaagccaatcagatgctaaattcaacccacaccaagctaccatgttgtttatgtacacttggctgcagatgatagtgatatactataggctgattgtatccagacatcttatactttttcagtaaagctgggcgtcagccttttgttctaaaattagggttgaaagtgattcgaataatttccatccgaccggaccttttttcggattcggatagtttcggtcggatatatctgaaaatttttgaattcggatttttttttcggatatgaaaacgaatatgatataggtgatatccgtcagatattatccgatattttccgtcggatatccgacttacacataaggctgccataatccataagccagcccaacccagaggagtcaaatcaaagttcttgaaaaaaatgaatttcgaattgaattttatgatactgaatgaactcatatgaaaaagttgtcaaaaacaaagttgtagaactcattaagatctaccaattttattttggtcatttctccatccgagtttcattgaactatataaaatttgaattttaaaatataagaaattcaaataattcttcgggtagtaaatgatttcaaatggaaaaattgtcaaaaacaaagttgtataacttaccaagatctataacttttattttggtcattttcctatatgactttgtttgaacagtttgaatttgaatttgaaaatatgacaacttcaaacaatattttcaaatactaaatgatttcaactgaaaaagtcatcaataacaaagttgtataaatcatcaagatctataacttttattttggtcatttcttcatccgataaagtgacagtaacattgttcacaaaatttacatatctctcatttggttttacaatctataagagaggtatataaattttgtgaacaatattactataacttcgtcggatgaagaaatgaccaaaataaaagttctatgtcttgatgagttctacaacttttatgttttatttactgcttcaaaatatcatttgaagttttgaaattcaaatttttaattgataaaacaaagtcacaagaaaaaatggccaaaataatagtagtaaaaacacaataacatgatagagcatgattttagaaacatttaggaaaaagaatcatccaatttggagttcttatgagtgagataaactagtttcaaatttttaaaatttattttcgcatacggctcattaacgtctgtatttttccatgcggtctcttaagtggtccgcatgcaaaaatgggctcattttggcatcttaaggagtagtatgcgaaaataccaatgcggcaagttgtggtccgtttgcaaaaatcatagggtcttgtacacaaaaatcgtttgtgtagtattgaggggtttttatatttcgattaatattcatcaccgtattcgcttcgcttcgtattcactccatatttgtattcgataatattcgatttcgttttcatatttgggtttccgattccgattttgattccgaaaaaattatgaaaacgaatataatagagctagtttccgaccgtattcgatccgttttcatccctatctaaaatatagtataggctgataaaataagatgggtcgtaactgtcgacgtttgatagtcacgactagggaatttgaatagtatgggatcgttggtaccagggtatatgcgagattgaggtaaaagagatgcagacagtgatttttatacaggttcgagccccttatctgataggtaatagccctacatcctgttggccgaagccggtgctgctctttattcatctggatcacacaaatacaataattgggataatctatctatccatcgtcgacttggcggctatataaccaactcgtagtcgatgacagggtaatcttcctcctcgaatctgtactcggcgagaacagagatggcgctagatacctcttgccggcccatgtaggtgccggatagggcatggctaggctaatctctgatgttgatatacaacggcgtattggcttgtattggcttgtggctttgtagattgtggtgggtgtgtcccctctcctcctagggggcttgtatttatacccacaggtgaccccttgtccaagtagaactagggagataaatatggatacgatctgagtagtgagtagtccttgtcgtttctatgtagaactcttcttctccttccttatccggaactccttctatatacgaggttttttttccgtataagacatggcatgtggtgggccttgccgagcttagtcgattactattgggtatccataaccctgacagtaaaaacttcttaacaatgcatgcaaaaatgtattcttgagtaattaaaggtctatatttaaagaatatgacaaaattaaatatatattaccataatattggttacaaatataataattctttttttaagtagatatgattaaggttcaaggggaaaatttctattgccccttaataaatgagggatgtttgtgagtgatggtggttaagagtaagatgaattgaatgaaaattgattgacaagtactagtattcagaatgcttatgtttatgaactaatgttaaaccctttagttgattgactagggagagtacacacacacatatatattttatcaacgcttagaccattcgtcttattcaaaatttttgtgtaaatataaaaatatttaaatcatgcttaaataatatttgatgataaattaagtcacaataaaataaataataattacataattttgttgaataagacgaatgcaaacgtataaaaaaaatcaacggtcatacattgaaaacggagggagtagcgaaagagcttgtagcctagtggttagagcctcagtagcaccttaggtcctgggtttgactccccataggagtgaattttctaggatttaatggctttgtgctttcagtggtagatgacgtacccgtcaacagcgaagcgtctgtgttaacttcgtcaatttccataatttgccggcccagtcttcgaagatgctcataggggtgagtgtgcgtgcattgtgagtgtctgtgttgtactgtgtaatttttttttttaaaaaaacggagggagtatataccaatcacctattcaaccacgatctagctagatcaccatctaaatataacaactcataattttactcttttattacttaagcaattccacttgtgaatattttttttactcaagccgtttggcagttggcaccaatgtactcacaattttactctttttacaatatctatttacatattaacactaatgtaaatcatactcaagttgttattgtgcataaaataaaaccacatataaaaccgcacatgagttatttaaactggtttcagtacttcatgggtagaatatgcagtttcatacttggggtagcagaccaacctcaatcggtagtactacatttataaaaaaagtatatgtttcttatattatatcgcagctagcgcactgtataccttatagaatgttatgatgtgcgggaatgaaattttacgtgctatgtatttgtgtactttgtatataaatgtgagtaaaaagttttactcacaacatgtggtttagcccaagcggtttttatattatgcgactttagatgatagtttgtttgaataaatttaggcagttgaaaaagagcaaaaccttgaagttctgtaatcttgtttgataaaactgcttttagaccttgtgagatgcttttctttttcatttatgttgccactaaaccatgatattgttccatcctgaaaacataaaacaattggagaagaattgacaaccacacatatattggagaaagccgaaagacgagtctttattacaagaaacataaaaagcaaaaggctaggaacacacaccaccgttgggacgacgaccggccaggcttaaacccaccaccactcaaattaagacgcaaaatatagttaagctggtcaccattatttataactcctcaataatacaaaagattaatgatttctcgaacttaatcgaaattttccattatttgtaacacgcttaattctctgcaaaatcttagtttaaaatcatccctacatatataacctgtgaatctggcatattaatatagccaaggtcgtcgagtcgtgctcgatctgtggacacgagcattctgatcaaaagaagaggaccaaaatttcctgagtgaaattaaaaggtataaatcaaacccctgtccgccgtgacgacgagctgtcagccttggatgcactgctcagatgatgacctatcgattcgtctacgtaagggcaccaaatttcatgttataaatcgttttatcttttttcttaatcaaacttgtttaatattgatgcagtttaagaaaaacataatatatatattttttaaacacaaaacatattcaatgttagatttaattaagctaatttattgttttaaatgtttttatttttttctataaataacttagtcaaactcaacaaagtttgattagaaagagttaaaatgagttatactccctccgtttcacaatgtaaatcattttagcatttctcatattcatattcatattaatgttaatgaattttgacatatatatctatctagattcattaacatcaatataaatgtgggaaatgataagatgacttatattgtgaaacggaggaagtaatatggaacgaacggagtatattcaagtcctgtgtatcgatcattcatgtatatgatcagtcggaatctcaggttgtacatgtatgtagtggtagacacctttgatagctatccattttcacagtagtttcgtgtgatctccacagcctccacagtacatgagagatcgaatgaagagggaggctctactacatatggtcacctgcggtccatctgtcccaggtcaccaccagtacatatggtcactatatatatatatatatatatatatatatatatatatatatatatatatatatatatatatatatatatatatatatatatatatatatatatatatgttgactgatgcatagtttcccatgcataaattgtggtagtcgatcgataatatagaccctgtttagatgtgactagtttttagtccctatcatattggatgtttggatactaattataaatattaaatatagactattaataaaacccattctataaccatggactaattcgcgagacgaatctattgagcctaattaatccatgattaccctatgtgatgctacagtaaacatgtgctaattatggattaactaggcttaaaaaatttatcacgcgaattagctctcatttatgtgattagttttataagtagtctatgtttaatactccaaattcatcagatatgacagggactaaagtttagtccctagatccaaacaccaccataatgcatggctgtagacgcgagatgaggaagcgtatctttggtgactagaaatttagttagatttacgcctttatggatttatatattttatagcctctctctatatatattgcatatgttaaaggggattatgggcatgcatacataagtgtattatgtgcgtatctatctttgtgttccgtgtagaagaaataaaagatgtggctacctatcttactataaagttataatccacaaatcttaaagcttaacatgcaaacatgtcacctcatcatccacaagcaataattacatacaaaacttagggcctgtttagatgcatttggaatggcaaatggcaaatggcaaaagttttggtggcaaaagttttggtattgcaaaactactagttggagtttagatgcatactaaacttttgccattctgtaggatcgagatgtcgactagagggggggtgaataggcgatttaaaactaaataatacctaatcaaatttaacctaagttgctaggcttggtgagggagaactctaactaagcaactaagttatgttttgcaaacctagggtgatagtggctcaaatatatctctaggaaagtaaatcacgctcctatgtcgatgttttgcaatcctagggtgatatgatctcaagtgtgtctctagaaaagtaaattgcacaaatgtaaatgcgacaatcaaatgagacaagagatttttcaccgaggttcggaaactcgccggtttcctactccccgttgaggcgagcccaactccaccgctcaactacgaagccaccgcacgcccccttcgtcaaggggtgggcaaggcgggagccggcccacggagaggactacccaagcctcgatcactcggggtagttcttccttcactccgaaggtggtgaactctaaaccactcacaaaccggcgccgggcctcctccacaatcttctcggagaggtcaccgggcaactcctccacaagctgtctaggaggcggcaacctccaagagtaacaagtaatgacccggtgtggagatgatcaagtgccacactagctctacaatggaagcaaatgcacttgactcttggctaaacaaccctctaacacactagatggatgaacacaaagctcaagtgagtgtgagagaggtgcaaggagtgtatgcaattgaattgggtgccaagagagcccccttgctgctggtgggggagtatttatactcccacccaccaaaactagccgttgggggcgaaattccccaactctgtgctctgccggtctgaccggaggtatgcggccggtcagaccgtgctactctgcaacggctaaaaaactagccgttgtagccctgtcagagggccccatcggccaggccggtcagaccgacatggggtggccggtcagaccggcctcggctcggtcggaccgccatcggctcggtctgaccgactacggctccgtcggctctgtatcggccatcccgagcagcatcatctcggcctccaggaggccggtctgaccgggaaagtgccaccggtcagaccgccactatgtagccggtctgaccggccagggcacgccggtcagaccgccactatgtggccggtctgaccacccctggtcaggccgaacctagtgaatttgtgtaatgaaaaagcgagcacaaatgaaaatgcaatgacctaatgtggcaattaaaatcatctctttgctaggtcattacccctcttaatagtacggcgaaactaaaattaaactagcaaatttgatcgccctacacctcgatcaattctaaattaaagcgctagttttaccgtcttctttccctttgctttgcgccgtcaattttaatccatcgataatcatccatgcgtgcatatgacgtggacctaacttaaaatgtatagctcaaagacaacggttagtccacaattagtgcttgtcattaattaccaaaattaacaccgggggcctagatgcttcacattctagcactaaagtgagagagagaaagagagagggagtggtcccaaagcactttttggcataatttgctactatgtactagcaaatgccaaatgccaaattgccaagttttgctactagtgtttagatccaaaatggcaaaaagtgcttcaaaatgacacaatatagagtaatagcccatacccataccaaatatagcccaatcctccttaacctattaaatatgaggtgactaacctcactactactagacccaacccacaaaacataaaacacgctattctcccccttttggcatcaagcaccaaaaaggtcttcactcttgtggaggagaaggaggacgcgccgaagtggaaggatgagaagcatcacggcggcgatgatagacaaaagcttgggtactctccaaggtttggacgcgagaatccaatacacccaccctagtatgcaatcttcccaccgaagtattcaagttgccaacatcggtgcgcaagccacgaacatcctcacgcaatgcttcatgcccggtggataagcgttgaatgctttcactgagggtattaatagccccaaggaccgggttaaagaagtcatttggttgcattccaaagtaggcatattgtggatggaataaagtacttggatcatacccttgaggaggaggggggctgcactttagcttgcaccttgatcaaaagttggttggcgcacacgaggagctctaggggaggagagttggagacgaggcttgtactccttatgttcttttaaattttgaccaatttgtcccaacttgctttgaatcaacctcattatgtagggagcataatagattccttgtccaatagtcccctttgagatggcaatctccttcatcataaggttgataacatcaaaccgacgaccatccataatggcatcaataacatgccaagcaactccgcgtatgtcatcattgttgccgtatcttgggaggatggtggcccttactatgcggttgatcacacttgggagagcccttaaacccgccacctttccatatgtgtgccttcccccttcttcataaaactgagaaaagtgatcaatgggaaagagattgtgggtgtgctcatcatgaaggtcatccccgttgttgaagcgaatgtgcaagagctccttgaattcacggcggttgatagagcatcggagggtccccgacatccacttcattgcatcacaatcgccggacacccatacggtggcatagaattgccggatgagatcttcatcaaaaggttgcttcatggtgacaattctatcaatcccaatggtccggaacatctcttgcaaattctcaaactccggtgtctcaccaatgtgcctccaagagatccatttgtgttcggcgaaggctttgttggcatacacttgtacatacacggacttttggaaccgtgtatgaaatcttggatcattacaatcgttaggcctccggaattgatcatgatgacggaggatagtgtattgttgagcattcctcaaattaagcacaaattggatcgaggaatcgagaggactcccatcatcacttgcctcatcatcttcaccatttgcactctcattgtcatcaccatcatcacttacttccatctcatcaccctcaacattttccatattgtcctcatcactttgaacatactcatctccgcttgattcctcattctcactaacgggatcgggcgtgggagcacgacgaccatgccgagtgcggggaggcatagctgaaaaacaaggagcaaaggatggatgagcaacaattttagaaaccacatagtgaagtgggaggaagggcgagtgctgcctgtcaggggcggtcagaccgagagccacggccggtcagaccaacggctcaaggccggtcagaccgccggccctcggccggtcagaccgcgtccggtcagaccgccactgacacgagcacacccaaatccttccacaatccacacaaatgattctaaaaattgctagaacagtgttgcacaagattggaactagaacatcaaggtgtaggtctattgaagcaatgggaaaactacccttaaccctaaagattgaaatagaccgatttgagagcaatgcacaagagggagagggatttaccggttgaaggagttgaatcacaccaagaaactaccctctattggtgcaaatcgatgaacacctcttccttcacctagggttccatgccatggatcacaaactcaataagaactcaaatcaatccatggaatagagagaggaagaggaggagatttacttatggtgtaaccggagtgattttgacagttgaaccggatggatttggtggagggaggtggctagggtttgggagaggagagaggaggagtttttttgagttggagaagagaagagatgagatgggatgaggaggggtcgggtagaaggaggaggaggaagaaaggacaaagtcctgggcccaccatccctggccggtcagaccggctatacgtggccggtcagaccgccaggatgcagccggtcagaccggttcctagaggccggtcagaccgccaccaccaggccggtcagaccgcgcatatagcgccggtcagaccgcctggccccccagccgactgtgcatagcccttgcacagttcggctacccccatacaataaaattcaacaaaaatttgaattttggagcaattttgaaatgtgtgagttgaaatattgccaaccattcataatatttgaaatttatgaagatttgcaacaaaacttacttgagtgctaggaggtgaccatttatggtctataggggtttttgggcgaatttgattttcaaacaacttttgaaatatttggattttgaatatgatttgaataccaaaaacatttcaaatcctcctctctaccaactttgttttgaaacttttctcagattccttctcaaactcattttggggtttaatctcattttggccaaaaacaagaatctagattcttcaaaagagagccaaaatagcatttttcattcaaaaatcatttttctagcaatgtgaggcttggaaaacatatagggacccttttgaaacattttccaagagatagttttcaaatttcattgattttgcaaaacttttgacttatgttgacttgggcattttgaaaacactactagcacttttagttgatttgctcacatataaaaggaagtagagcacatgcaagagtccaaaactcccccttaatgtgacatgctccattttcgcaatgaagaaccaaatggcaataagtccaaagcataagagcaaataggagcaaatatacaatatgcaaaagaagcaaccatggtgcaccatctcatgccacattagagaagtctatgacatttaactcattcctcaacttgcaaaagcgggtttcatcaagaggcttggtaaaaatatcggctagttgatcctcggttcttatgtggctaatgactatgtcacacttggtaacatggtctcttaggaagtgatggcgaatgtcaatatgcttggttctagaatgttggaccgggttattggctatttttatggcactatcattgtcacataggagtggggttttggtgaaggatataccatagtccaacaaggtttgtttcatccaaagcaattgggcacaacaactacccgccgaaacatattccgcctcggcggtagagatggctacggagttttgtttcttgaatgaccatgacacaagggatctaccaagcatttggcaactaccggatgtgctctttctatccactttgcaaccggcataatccgaatcggaatagccaacaagcttaaatttagcaccttttgggtaccacaagccaatagtagaggaatgctttaaatatcttagaatcattttcacggccactaagtgacactccttaggagcggcttgaaaccgtgcacacatgcaaacactaaacatgatatccggcctagatgcggtaaggtaaagcaagctaccaatcatggaacgataaagctttaaatctaccggtttacctccctcatcaaggtcaagatgtccgttggttgccataggtgtcttgatgggcttcgcatcctccaagccaaacctcttgagtagatccttgatgtacttggtttggctcacgaacgtcccatccttgagttgcttgatttgaagtccaaggaagaagctcaactctccaatcatggacatctcaaattccctagacatcatatcaccaaattccttgcaaaatacctcattagtagaaccgaatatgatgtcatcaacataaatttgacacacaaagaaatcatcaccaatgatttttgtgaaaagagtggtgtcaacttttctaattttgaaatcctttgacaaaagaaaatctctcaatctttcataccaagccctaggagcttgttttaaaccataaagagcttttgagagtttgtaaacatggttaggatttttaggatcttcaaaaccgggaggttgttcaacaaagacaagttcggcaatttcaccatttagaaaagcacttttcacatccatttgaaatagttttatatcaaagcatgatgcaaatgcaagaaggatgcgaatagcctcaagtcttgccacgggggcaaaagtttcaccaaagtccaaaccttcaacttgtgtgaaaccttgcgccaccaaccttgccttgtttctcaccatcaatccattctcatcttgtttgttcctaaagatccattttgtccctatgacattatggtctctaggtctttcaaccaaagtccacaacttgtttcttgcaaagttgttgagctcttcatgcatagcattcatccaatccggatcacaaagagcttcatctacatgttttggttcaagacaagaaacaaacgagtaatgttcacaaatcgaagcgacacgagatcgagtttgaacacccttactaatgtcacccaacacttggtcaattgggtgatccttggaaagagcggtgtgtattcttggaggcataggtggatcttgtgccttctcctcctccacttcaacttgagcttgacttgacgaggcggaagtagatggctcttcttgagtggaggtggatggcttgtcttccacttcaataggcttgacatctccaatagacatgttcttcatagctctcatcaagccttcatcacctacatcatccaaattctcgtgcccctcttgggagccattagtctcatcaaattgaacatcggcggtttcttccacaatacctttgttcttgttgtagacccggtatgccttgctatttgaggcataacctagaagaaacccttcatcacaccgactttcaaatttggttagtctaacaccctttcggtaaatataacacttgcaaccaaaaactcgaaaataggcgacatttggcttcctcccagcaattagctcataggaagtctttttcaagagacgatgcaaataaagcctattggttgcatggcaagcggtgtttatggcttccgcccaaaaggaatcggaaacaccatattcatctagcatagtccttaccatctcaatcaatgtacgatttttcctttccactacaccattttgttgaggtgagtaggtagcggaaagttcgtgtttgataccaagatcatcacaatagtcctcgatattggtattcttaaattcggaaccattgtcacttctaattttcacaagagtgcaactaaattcattttgggccctttttgcaaactttttgaaaatctcggcaacaatagacttatcatgcaaaaagaacacccaagtatagcgagaataatcatcaacaatcacaagacaatgactattacgaccaatgctcttataggttgttgggccaaacaaatccatatgcaagagctccaatggtctagatgtggacatgatactcttagtaggatgagaacatgcaacttgcttgccggcttgacaagcactacaaagcttatctttctcaaacttcacatctttcaagcccacaactagatcacgttttgaaagtttgctcaattgattcatgccaacatgagctagcctcctatagcaaagccaacccaatgaagtttttgcaactaaacaagttttcaaatttgcttcactagaattgaaatcaaccaaataaagatttccatatctaaaacctttgaacacacaagacttgtcaagaaggctagaaacaataacttcttgtgggaagaaggcacatgacaagctaagatcacaaatttgagcaaccgaaagcaaattgaaatttagagatttaacaagagagacattttcaattgacaaatcattggagatagcaattttacctaacccaattacctttcctttgctattgtctccaaatgtcactttctcttgttcattccctcctacttcaaatgtggtgaatatagccctatcaccggtcatgtgttgagtgcatccactatcaagcacccaatggctcccaccggtgcggtagttcacctacaaaagaagatcaagctcttttaggtacccaaactagtttgggtccttggaggttagagaccaaagctttgggcacccaaatggcattctttttaccaccgagtataggggaacccacatatctagcaacaatgttaccatcatgagccttcctaagcatataatgagaatcaaacatgcatgtcttaggaggcttacctccggggcaatcactcaccaaatgcccaacctcacgacacttggagcaatacttaccatttctcttgacaaaacgagtggcatggtgagaaggtttcttatccttctttggaatgaatccaagtccctccttgttaaggatgcaccgttgctcactcataatcttgtcaagagtgttattacccttgaagcatctctccaaactcttgttgagcttagccacttgctccttaagctcattgttctcaacaacaagtgaggcatcacaaatagaaacacacgagctagaactagagcaagggctaggcatatccataagataatcacaagaggtagaaatgctagatgatgcaacatgagtaatatggcaagtagcactatcatcaagcaaatcacaagatatgccaacatcaatgtgagctccatgttgagtagttgaaaggaggttgtcatgagcttccttaagcttctcatgagaaatggtaagtctctcatgagaggtctttagctcctcatacaagacctccaaagaagcatgatccttctttagggccttgaacttgacaatctccttctcactataagcatggagctcctcaaacatactcacaagctcatcataggaaacatcatcacaatcatcatcactctcactatcactaagagatgttaccttagaggaaccctttgccatgagataaagtggagcaaagagtgatggagcctccttgatggcaacaacgatcatcttcttcttcttggagcttgcatcatcaccaccttcttcctcggacccggatgaggcggagcactcctcatttgagtcccattccccgatgaaagcctcaatcttcttcccttccttcttaagcttcttcatgagcttgtagcctccactcttcttcttggatgacttgtctccatcatcatccttggaagggcacttggaagcaaagtgtcccttctcaccacactcaaaacacctcaagttggagagagtcttattgagtcttctatttcttctcctattggagttggagccccttcctctctcctttctccttcccgagagatcattgaaccttttagcaagaaggaccatctcttcctccaagtcctcattgacttcattcaccttactcttgctcttgtcttcaacttcggcttggagagcaatgcacttcttggagggtgaggcttcctccatctccttcttcttcaacttgtacatgtcattggtgttgatcttccccaagaggcttgtggatgtcattcttgacatgtcggaattgatgagcatggtgacaagggtctcatacttctccgatagggctctaagcatcttttgggcaacctcaagatcggtgtagttgccccaagccccttgagatcattcacaatgacattgagcctcccatacatgtcattcacactctcatgaggcaacatggagaatgtctcatattggatcttgaggaaatgaagcttggcatccttgtactcacttgtaccctcatggatctccgccaacttgttccaaatctcatatgcggtctcaaggttgctcactctatcgaactcctcttggctcaaagagttgaacaaggcattcatggcttgggcattgagttggaggttgcggtgatcaatctccgtcaagggtgtgccggtgatggcaaagtctacatccacaatactccaaatatggaagctcatagctttgaggtgagtagatattttaattttccaagtggagtagtttgtgccattaaacatgggagccttccctacatggttcacctcgttcgacatcttctctctaggcggtgaagcccaatcaagagagaccaagctctgataccacttgtaggatcgagatgtcgactagagggggggtgaataggcgatttaaaactaaataacacctaatcaaatctaacctaagttgctaggcttggtgagggagaactctaactaagcaactaagttatgttttgcaaacctagggtgatagtggctcaaatatatctctaggaaagtaaatcacgctcctatgtcgatgttttgcaatcctagggtgatatgatctcaagtgtgtctctagaaaagtaaattgcacaaatgtaaatgcgacaatcaaatgagacaatgagacaagagatttttcaccgaggttcggaaactcgccggtttcctactccccgttgaggcgagcccaactccaccgctcaaccacgaagccaccgcacgcccccttcgtcaaggggtgggcaaggcgggagctggcccacggagaggactacccaagcctcgatcactcggggtagttcttccttcactccgaaggtggtgaactctaaaccactcacaaaccggcgccggacctcctccacaatcttctcggagaggtcaccgggcaactcctccacaagccgtctaggaggcggcaacctccaagagtaacaagcaatgacccggtgtggagatgatcaagtgccacactagctctacaatggaagcaaatgcacttgactcttggctaaacaaccatctaacacactagatggatgaacacaaagctcaagtgagtgtgagagaggtgcaaggagtgtatgcaattgaattgggtgccaagagagcccccttgctgctggtgggggagtatttatactcccacccaccaaaactagccgttgggggcgaaattccccaactctgtgctctgccggtctgaccggaggtatgcggccggtcagaccgtgctactctgcaacggctagaaaactagccgttgtagccctgtcagagggccccatcggccaggctggtcagaccgacatggggtgcccggtcagaccggcctcggctcggtcagaccgccatcggctcagtctgaccgactacggctccgtcggctctgtatcggccatcccgagcagcatcatctcggcctccaggaggccggtctgaccgggaaagtgccgccggtcagaccgccactatgtagccggccggtctgaccgcccctggtcaggccgaacccagtgaatttgtgtaatgaaaaagagagcacaaatgaaaatgcaatgacctaatgtggcaattaaaatcatctctttgctaggtcattacccctcttaatagtgcggcgaaactaaaattaaactagcaaatttgatcgccctacacctcgatcaattctaagttaaagcgctagttttaccgtcttctttccctttgctttgcgccgtcaattttaatccatcgataatcatccatgcacgcatatgacgtggacctaacttaaaatgtatagctcaaagacaacggttagtccacaattagtgcttgtcattaattaccaaaattaacaccgggggcctagatgcttcacattctagcactaaagtgagagagagaaagagagagggagtggtcccaaagcactttttggcacaatttgctactatgtactagcaaatgccaaatgccaaattgccaatttttgctactagtgtttagatccaaaatggcaaaaagtgcttcaaaatgacaaaacttttgccattttggaggatctaaacagggccttatacaagcatgcaacatcatctataattcattgaattctagaaatcaacatccaatcattttccttcacattattaataattacatacaagacttatacaagcatgcaacatcatctataactagatgaataccccgccgcgttgctatgggaaattaagttgcataatatgttcaaataaaatgaaatctaaataataaaacttaaataaattgatacctatgaattttgaggcctaaaaatggttgtgattacttggtgttatgagagaagaaagaagagacaatttgaaccataaatctatcatctaatgactagaaataattggggtgatgtggcttaattagagaagagagaaatatcattaactaaactatataagtatataggattcattgaattctacaaatcaacatccaatcattttcctttacattattaataattacatacaaaacttatacaagcatgcaacatctataattcattgaattctacaaatcaggtatccataaccatgacagtaaccccccgacttcaactcaaatgaattcatgttgtcatccgcgttttctctgtcaacgttgtcatgctcacttggtcgttctcgataacaatcgagaagacatggagtactcaacatcattgaaacaagatcaatggtccacaagtgaatttgaattgaagtctaaacaactgccataaacgagcctgaaatcaacgcaaatgaacgagttgatgttctcgaccggagaccttggaacaacagtcgtcgtgatcgcttaaccgttctcagttgatcgagaaggtgcggagtatgtgactacattccttgtcttgtcgtaatcaagaatttgggttgaagtcaagaattttcatctcagcgggtacaccatcgcttcattccgtaatctttgtcgaactccaccaactgttctcgagtaatcgagtagttgtccaatcgttctcgagtaatcgagtagttgtccaaccattctcgagtaatcaagtagttgtggaatctgtgacaaagctctgaaatatgactatcctgaaatcaatactcagacagattgttagatacaaatagccccaagggtaatacaatataatatgaattttaaaattgaaaatatattgaatttgcacatgacaataaaagagtactctcgctaaagcttccatcagcaataggagtctgggactcttcctagcccccagctgtctttatggaaaaatcgtttttccacaaaggcagctaaatcttataacaaaccaagttgaagatgacgaaattctagcatccagccatgaagttgggaaaaccaattctgattacacggcttagttaatacgcattcaaaatagcacaaaggaacgataggatcgacttcaagacagggcgatataagaaaagaggatcaacggacaaatattacatatacaaacacttacagaggttgtcggagaatccatctcttgaacccatcttgtcgaaaccttgtagcaccaaaatccccatacctggcgtgccactgtcgacgtttgagatctcgactacggttattgcatggtatggagactgtcggtaccagggaatatgcgagattgagataaaagagatagatacaaggattttatacaggtttgggcccccttatgtgacaggtaatagccctactcctgttggccaaagccggtgttgctctatgttcatcagaatcacacaagtacaatatttgggataacctatctagctgttgtcgacttggtggcatagataaccaacacatagtcgacgatagggtaatcttccttcccgagtaggaactcattgagatcagagatggcgctagatcccttttgtcggcctctgtatgcaccatattgggttgtctaggcttatctctgatgtcgatgtttggcggcatgtggtgtctattctgacttgtatgtcgatctgtgtgttgttctgttccctctcctcctaggggtcatgtatttatacccatagatgtccccatgtccaagtagaactagggagacaagtatggatacgatccgagtagtccttatagtttccatatagaactctacttgtccttattaatctggaactccttctatatacaaggtatgattccgtataagacttggtatatggtggccccaccaagcttaatcgattactattgggtatgtggtatccataactatgaaaacatgtttcttctttcactataaacaatgctcgtgcattgcaacgggtgaaggttattttaatcttattattgttataggagttagttaaggtgaaattcactgtgggaattcacttggatatatatttttctagaaaaaccatgagctgcaattagaagtccgatcatctcaagttagcatgcgagttttttaaagagatttcttatatgactcctatatttccaaaaccgaacgaacttaaaaaccgactcatatacggatgatgtaccaacatactggcaaaaacatcttcaatttttataatagtagagaaaagatagaaatatgtatttccaaaagcgaacgaacttaaaaaccgactcatatacggatgatgtaccaacgtactggcaaaaacatcttcaatttttataatagtagagaaaagatagaaaatcatgagctgcaattaggagtccgattatctcaagttagcatgcgagtttttcaaagatatttcttgtacgactcctatattttcaaaaaaccaacgaacttcctaactcaaatacgaatatgtatttccaaaagcgaacgaaattaaaaaccgactcatacacggatgacataccaaagtactagcgaaaacatcttcaatttttataatagtagagattctcaaagcccaagggaaatcaagcaatatattactgtacctccaatacaccaccataatttgagcacaagttgacttactcgctctgtcccataaaaaatcaacttctggctacgaatctagacgcagcgtacgtccaaattcatagggagtagttcataaacttaactaaattcgaatattttgaataacccatgttatatttttcctatttctcaattatttgtactgcacgtgcatttaatttattgtaacccactctttttttttgttaatgtgttttttaatcatgcattctaaagaagtccccttaagtaatgttcttggatatacttacattaaatgcttgagtattttaaagcaatattttccgctccaaatatttcctagctatttatagtacctcgacaaagtttatttttctaagacaaatgctaaagtgaggctttattatttgcagctagcgatgcatagggttgttaacggcccgagctcaggcaaacctaggtacctaggcccgagcttagcataggtttgagctgagctcaagccgaacttatcatgaccttcatgtaggttcaagctcaagttgggtaaagctcagtcaaactcgagctcggtttacgtgtaggctcatgaataggtagcagaggttttaagcatggtatcttaataaaaaaaatggtttccagctagttaatcaggctaacataaaagaaagaggggctaaggaaatatatcttatcttaactaattaaaaaattcgtaactttctgatcgtcatcttgtttttgtccatgttttcgttcgtcaacatgctaatttttcgtccgtgcatatgagcacatccgatttcgcaaaacaaaaaatcctatctggattgccccagagccccaccaacgcaaataaaaaggataaaatgcattgagaagaggtgacgaactaattcctttgtaaaatccagaagagaaagaagaaccaaaagcaaaattggatatcagcttcaatggcttcatcccaggtcagagaattaattttcgtaattgaaaggtgattgtttataggctaaagcaataagatcttgaattagaactccaacattgtggtatcaaagcttaactttaacctatttaatttcttattcagattattcatgtgattagaagccatcaatgccattttggttcgacatgaacaattttgagtcaaacgagatcaatcggtttcaattttcccaaaatccccaatttgaaagaaccctaagcccccaaatcttaatcaaatccaaatctaattaagaaaattaagtttgagttctgtcatggttatggataccacatacccaatagtaatcgattaatcttggtggggcccaccatatcttatacggaatcatacctcgtatatagaagaaattacggataagtaaggacaagtagagttctctatagaaactacaaggactactcggatcgtatcgatacttgtctctctagttctacttggacaaggggacatttataggtataaatacaagaccccctagaaggagaggggacagaacaacacacagatcgacatacaagtcagaatagacaccaacacatgccgccaaacatcgacatcagagataagcctagacaaatccaatatggtgcctacggaggccgacaagagggatctagcgccatctctaatcacgatgagttcgtactcgagaaggaagactaccctgtcgtcgactacgtgttggttatctatgccgccaagtcggcgacagctaggtatgttatcccaaatattgtacttgtgtgattctaatgaatatagagcaacaccggctttggccaataggagtagggctattacctgtcagataagggtcccgaacctgtataaaatccttgtctccatctcttttacctcaatctcgcatatacccaggtaccgacgatctccatatcatgcaataaccgtagtcgagacctcaaacgtcgacacatgtgatactccaatttctaactactactcttcttgtactgaaacatactaatttttagcgtttaaaatttactaactttccaatctcatatatatatctcgtatactccctccgtttgtaattatattataagttgttttatttttttcatttatatctcatattctcaactaaattaaatttaagtttgactaagtttatagaaaagtatagtagtatttctaaatgaactaattatgctagatttaataaaattaatttgatattttagatcgttcgaaaaaaaggtcatcaacggtctgatcgttcgaaaaaaaaaagtaggtgttgagatgaaaagagtagtgaaagagaaaggtttctctaattttcttatacactaatcctgcatttcgaataaaatcatagtgctaattaaataccaacaaaattaaaattcagcattttttaattttatattcccacctaatgctgctaacctaggagtccagatatgaatgggatatatcggatatgattgctgacacaacatacataggggtacgtgtcatacataggggtgtctaggtaaagccgtgtaaagttttagagtgtcacatcgaatattatatagggtattgtatggagtgtttagacactaataaaaaaaactaattacagaatccatcagtaaaaccacgagacaaattttttaagcctaattaatccgttattggcacatatttattgtagcaccacattgtcaaattatggggcaattaggcctaaaacattcgtctcacaaattagtcgcaatctatataattagttctctttagcctatatttaatattttatacagttgttcgaacgttcgatgtgacagattgtaaaatttagggtgagatgtaaacaggcccatacttcgagagccactactagtgcaagcacatgcagatagaaagggccacatcataatagcctccattctgtaattgccacttgcgcaactcaagtttaaatattaattactcctccagtggcctaacacaacataatacttcctccattttctttgatgatagctcaaaattaaggtccctttcggattaaaggattgacaaatcagagaaatagaaaaaaaataaaattctgactgtaaaacgtaggaaaaatacataaatgattgtttgattgaaccacaggaaaaacataggaattaggtaagagagatagactcataggaaactttccatgaggttagacctcatgttaaaaatcctctaaaacttatatggatttgggcattccttaggaatttcataggattcaatatttttcaatcctttgtttcaaagggctatataggaaaaaaaatcctataggattagaatcttacaaaattcctatgcttttccttcgaatcaaagggtgccctaaactaaccaacgtcaagaaaaggtaacatgtcgaatgaagtactagattgctactccctctgtttcacaatgtaaatcattctagcatttcttacattcatattaatgttaatgaatctagacattgttggaattaatagatgggctaaggcccattcgaagattaattctttggaaaatcacaaaagcccacctcatgggatggcatgcatgtggagtttagtaccaccttgcttattctaggagagggggacctccttaaaagggaggatgccctcctagccacttgaagcatgtgtggtggagagaagaggggaaacacacgcgcgcgctcgctcgcctggcctgggcaggcggcgcgcgtgcatgacatacgcgtcgaatggtccgcaaaattggctcctcacccttgcgcagatgcagcctccttttgcagttttgttttgctgcgggatttgttttgttttggaaacattccgaaaaatccggtgcgtgaaaacggcatggagtccggataggttacgcgcgacttatccggttcggtttacgcgggcgccctgatcaggcgatctatctctatataaaccgagccaccgccttcacgcagcacacgcaaaaatcaatctagggtttgcctcctactctgtgctgcgccgtcgctcgtagattacaccatcctgctcgccggcgtgcacctgcgatcgggagagcaactctccggaacctttgccttcgacgtcctgcaccgggagaaagcggcaataaggtttttgggaagcgctttgtgcgactgctccctgttcgtccacgacggctcgtcttcctcttcgctcgcgtgcttcgtgccttcgtagacgcctgcgaaaagtttcgaccgagcagccggtctttccgccacctcggtacgtgttcaatatgttgcgcatatttaatctgttcatgttatactgtgtagtttacatgtgtagatctaatgatgcgttcatgctagttttcatatataacgtcatgatttatttatggaatagattaaatcattatatgcctataatctcaacagatatatatatctatctagattaattaacatcaatatgaatgtggaaaatactagaatgatttacattgtgaaacggaggtagtataatttagaacagaagatattttttttaaaaaataaatacttaaaagtaagttatatccactacaaaatggttttcccaaacggctatattacattttcacaggcagtgtagaacccaacacccgcttgtccctagatgttcataaaaaatagtagcgattttcctaaaatgggcagttcaaccgtacgtgaaaaatggaattttcgcatacaaagcgttatgccgcaggactgcaaaaaaaaaaaaaaaaactactgccgccgtcgcctgaagcacatgcccgccaccacgcgctggttgtcgggaagggggagacggtgtactggtggccgctctagccgttctggtggatgcgtcatccccaaggctagtggcggcggatcgttcgctcctatctctactagcaaatataatattaggctataagccgactaaatgttgaggtggagaagagaagagaggagagagaggagaaagaggagaagcggtctgtaaacttacacccgacttggacacaagaatcaagaaattctgtgggagagacaagtgggtcctatattaattgtaaagagctaactattatatgggtggaatgagagaaggctgcaaagaaacttacctatcagaacggctatattattagcctgggtctactgcatcgtccaaatccactactgccactactggaggaagcgtgcgcccaccactacgcactagtcgctgggatgggggagaggcgagggaagggggcagagggtgcgctaaccataggtggaagaaaggagatgatttttttcgagagaggagaggggactgagaaaataaaagggagaagagccagcttggtggcagacaggtcacttaacaaacccgtctgctaaaatgggttcacagataggcatgttaactgacacgcctaaaaaattgttttttttcgcataagggctttgctcttctttgggaccgatattatcgaaaatggacaatgtcaaagtccgtctggaggcttagggagggctcctatgcgaaaaccattttttaagtactgatcattattataattatataattacccaacttccatttatcattatataatagttaaaaataatttatgcgccacattcaacattagcaactactccctccgtaaaaaaaaaaagacaaaccctgggtttccgtgtccaacgtttaaccgtccgtcttatttaaaaaaatatgaaaaaaattaaaaagataagtcacgcatagagtattaattatgttttatcatctaacaacaataaaaatattaattataaaaaaatttcatataagacggacagtcaaacgttggacatggaaactcatgtttgtcttttttttttagacggaaggagtagtaatcgacaacagaggtggtagtatgaagtttctggatgtagtactcgtttgagaagttttctgacgtttgtttggtcgatttgagtggtgcaggcgtgagcctttgaaatttggaataaccacgagcaatttaattaatccggtcattccaccaggaagacttgaaatttaattgtacgatatcctaattaaaacgaggaaaaagaaataatctcagcgcacaaatttagaaaagatcaccccggccctgaactattataaaattatggaaatcaatgtcaacatcagacactattttactcaaaaccgtacgcttttcaatgttaacaccgaatttatagtggtttagatgatgtgaagatgacgtacttaaaaaacaaatctagaactagatgtgatacattattaataataatattattattatcatcaactactactactatttcctctataagagtatatatattatagaaaaaaaaattggtaggagaaacaaaatataataagagaaaaaatgtttaaaactaaataaatgtatcttcttaggttaacaaactttattttcaaaacatagtaaaaacatagatgcttgtatacacacactcatccctatggatataagtaagcacatcatattcgtatgagcacatttgagagacttgactgatattaataaagtcaccatggacatattgttgtttatatgtatgtcgcttatcactttataagaatagttagctgaaatattccaattttgcagcaggcaagatttttttaatgaatttatgaaattaaaaataccattgtagtgatatgattctttttggatttcataaatcaataagtgaacttaaaaaagtcacaaaacaattctgcattgagcagttgattatatattataaccaggataagttcagtttacaattgaatagtttgaatgcaattgtcttaaacaccattttctggttcaattgaatttatttttctcacacaaaatttatctaggtagttgtcagggttatggataccacatacctaatagtagttgactaaatctcggcaggacccaccacataccatgtcttatacgggaactgactccggatatggagggagtttcggataaggaaagacaaccagagttctacatggaaacgacaagaactactcggattgtatccatattggttttcctagttctacttggacaaggggacatctatggttataaatacaagccctcctaggaggagagggatgacaatcaacacacgaccacctcaatcaacatacacagaggatcaacacccaacacaattgacatagaagccacaacatagaagcctacatatgcaagacacgccgccggatatcgactttagggataagcacggctagtaccctacggtgtctccagatactgtcaggagagacgaaagcgctatctctgatctcgccgggcacggattcgaggagaaaggctaccctgttgtcgactacgagtcagatcgtcagaccgccatgtcgacaacagttagataggctaccccaaacattatactggtgtgattatcatgaataagagcaataccagctttggccaataggatgtagggttattacctgacaattcaggggcccgaacctgtataaaaatccctgtctccatctcttttacctcagtctcgcgtatatcctagcaccgatgatccccatactgtccaaataccgtagtcgagacatcaaatgtcgacagtagtaaatactcctccgtgcaaacaatacttttttgaagaaaaaaagttcattttactccctataaagaatattttaccagagcacttaaacctatatactaatcttcagctaagaactattgaaactgatccactttactccataactctatttctctgcttttttctctttatataacttatattttgcactgaaattcagtaggatgaataaatgcattacaacttacctatcaatatttttttacataggttgaaattacgtaaggctgatctaaacatagatattttaaaattcaagcaaatagccatgaaaaaaattgagaatataaaacttgagaatggtatcatctttttatggcttaaaatatttcatcttaaaataacttgtataaagaaaaaaaatataaatactattaagatgtaggcacctaagatgtaaggtggaccgattgtgatagtttagaagtaaaataaacaaaaagttacatgattaagtgaattggagggagtaaaaatgtaaaatggatttttttatgaacttgttgaagtttttgtctactattagaaataaaagaaaaactcaagattgaaatatgaatgattcagtgggttagagttaaacagtatcggatattaaagttcaaatcgacttattttcttggatttctatgaaagcgaatggttgtaattcaattcaaactttggtttttgcttgatacatagcttccaaatcaaatcaaaaggtgttattgttaggtcattctcagtgggaggtactccctccatcccacattatatgggactgggcactattcatccaaaataaggaggctggcaaaagacacatgtacccctcatttacttatggctggtttggtttgaggcctaaattggccttaccaatatttgtcaacttcaatagtgtttattgtctatttggtttggagctaaattttggcatgcctaagaaaatatgccatttcaacagttaatttaggctattttggcttcaatccaaacacaattttacctttaccaaaattagccatgccaaaagttgacaaaatgtgacattgataaaaattggtaatgccaatttagaccacaaaccaaaccagtccttagtactgggcattagtagtgagagaatatttgggtttacaagcttgccagcaaatgattggcacaaagacagagtaagcatttctcagtatacaatgacattaatgcacatgttgacaagagtcaattaaattgatactcctacttgtgaggcttatcccatatagttcactggctagaacgttgctgcaaatttcatgtccagtaccacaccaatcaatggctacatccaagtcatacccacgctagcttccaaatcttgcattgcgttgctgcggtgtcaaaatcaaacaatccaaagcgtaaactgacatccaatgcaaagtccaaaacaaacacaggtactaccaacaacatggaaatggaagcatacacatcgaactcggctacgctgtatatatatacatggacgttgaactcaacgaaggcgacggcggcgtgcgtggcggcccggccgaacaagagaagtgtgttctcccgctccctcaccacctcgattcgcttccccggcggtgcccccaccgcacgggccaggttgggcaccggtggcggtggcgcatgggccaggttggccgccgcccttggccgccaccgttggctgccgcaccaccggcgttggcgtcgacggatgggaggtggaagggaaggagctcggatggatggggggaggtggaagaagatgcgggtgggagggaggcgctgatggaggggatagagaaaaggcaaagaaaatcgggaggggaacaagcggtggtcgatgggtgactcggtgagaggataaggtagggacaaattccaccgacagctctctgttcgcattagtactctccctgcccgatgtctgtttgtattagtactctacctacctgatcccttatattttgagacacgcttttaacccctaatcccatataatatgggactgaggaagtatcatttgcatgtttccagtagtgccacataagcaacaaagcatttaattgagaattaaaatagctcatacgatacatgtggttttgtttttgttgtttcgtaggtagaacatgcaagagaaactgtattggaaacagtgtagataagatttcatcaagatgaaacttattttatctctcactttattaatttcttgccgcatcataaaaaatactagcacgacaccctatttaattaaggccggccaatcaaactgtgacttgatatctgtgtcttgggcccaccagaataaaagattaaaaattattctcattagagtaacttttagacatgcatgcaaccattgatcaacacagatcaacaccccaaaagagaaaggatttgattgttagagtttatatgcatggtatatttggtttcagctcatggacgagatgcggtggtgcaaatggagcaaaagggttcatgaacaagtcagaagaccaagcagagctgcatgcatgtggagtggtgcaagacgatcgaggtccaagttagccaggtgaatcagttgaagcagtagatatgtatgcaagattagttaagacaaatgcgcctgtggttagttgcatgtattgcatgctgcttgaacgtttccaacacgtggcgtgagtctcggttgagtgatttcgccggctgttagttctgtaatttgagtctatatatataaagagaagaaaatgatgctagtagcttgtggtctgcataaacgaaaaccgcacctgtgttgccgtggtttttgcatttaagcgtgcggcacaccagagagcttgagtgtttgtgataaacacctacagaatgaaaggagagattcctaatatatattgattgacataatttggtaccagatgcatgatgaaattaacataggtgggcgtcttagggatctatatgtgaaaattatgatttttataggtatttgcttattggcgatccatctgcaaaaggcattttggcggcttggaataactattttcgttgtagtggatatttccattacatcctcctaattatattggtgagttcaataaaaatttctattatgaaataagaaatcctgacccatatatgtatcatttagcatttccacgataatcagtggttgcatatctgcttgaacatgaaattttactgattaaaaaactcattccaaaaaggctaattaagatgagtggactatatatatacatatttggagatcgaatatccacatagaaatttatagttaattagcacctattagcgaatgcatgcatcgtattgccaaattcataccggcagctaaattcatcatcaattaagcaagggaattcggaattcaaacagggtcaggaattaaacaaaaattaaaattaaaatcttgagagaaacactttgaaaaaaccacgttatcccgtcctttttccaaagtctgattctcctcgaccatacccaacacgaggcagaaagagtatatttttccaagagaccgtaatcccatcacgatcaattactgtttaatagcagtagcctatacactagttgaagttaacgtgcatagcggcatgttgcatacatttgcttttgtggacaaatcttttgcgttggttgggaatcttcccttctagcgcgaaaaaaacggagcaactcattagcacataaatagtattatttattaaaactaacttgaaaaatagattaatataattttttaaagtaactttttatagttttttttaaataatacaccgtttaacagtttgaaaaccgtgcatatcgaaaacgagacagagaagacggggacaatcggaagacagacagacgaacgcagccagtgtcaatatatgcaatacctgtctctttcgctctatcgaaaacgtaattaaaccattaagcagctacgactctttgacttttttttccttagaaaaaaatcaataagttgaacattgtattttcaacggtacgttaaattgctcattaattaattgcacgggccagtacgtatatttgaagatgtatacactatacagtgcatcgtacagtaatttgacttttacgttattagcgcatgggatttttggatttataggttgatgctaattaatccctcagtcagtctagtgcagttttgcattgttcatgttcaacgtatgaccgttcatcctatttaaaaatttttatgattaatatttttttattattagatgataaaacatgaacattattttatgcgtgactaattttatatttttttttataaatttttcaaataagacggacagtcaaacattagaaatggatacccagggctgcatttattttagaatgaaggtagtaattaaattgatgggcttactaatcttgatcgtatcaaagggcgatatatcatatcgagcctgttgttggagatgaaaaatcaatatatctctaactttgctccatgtttgtttattttggccaataatgcccgcctaatagatgcaagccactaatttgaatactggagtagaactgaagacaaagaaaatttgaatttccgtggcagttgtacaagtcccggtcaaatcaaatcaaatcagtatgtacttaattacctgcaagttgaagtaaaaaatttgcatgcgttaggttatcttgcaattaacttatcaaggatattgtaattaagttgtttatcttggcaagtaaacacagcagtagctttgtctcaagtgtcaaccttttattgcacaagtcaagtgaagtgatggactgatggtaggaaacaccaaagcatgcatgatccacggaagaaacctgatgttaattataggaaaaaaaatacgaattagttttgtaatgaattttggatacagaagcttggccccatgataggacaaattgccagtacaacagttggagcgttgaaaacgttattccctagttttgtgcaacaagaaacaagaagaattacaattatgttggaagttaaatacacctatgtttccaacaacaatgttggctatgccacaagtgcgacaattttatttataatattgatgagccaattaaacgtagtaagtagggataaaaatgggtcggcgtcttcctttttaattcgtaagttgaattcgacatatatagatacagacgtattattttagtttagaaaaatggtgtcgagtcggagccaagacggattgaaaatggaattaaaaattgctggatattactggtctaaagactataggaagtgcagatccattatttgaaaaaaaaagtagttctctcctggcctctaggctccagcaacgagcagagtagcaactcaaactgcagaccaatgggtgtcatggcgatagatcaaagcccgtaaaacattctagagaagacagattttttaattgtatgccatattgatatatcacgtccaattactaaaccacccctttttagtacaatttagagcgcactcaccaccatgtgtaagcacatgcatgtcctctacatactcttgaaatagaggcatcgaaatcttatagagtatggtggacatgctaaatcacctactgagtacataatcataaaattggtggacactagtgctagatctagaatctgaatccatttatgttaggtgccatatcttgtcgaccagcttctgaatctatgctacaataattatttttataagggacatggaagtaacgaaccttctggagttgattttgtgaaaaattttgaactctagaattgggtaaaattcagaacggagggagtatgtaagaaatacgataaaaagtgttaaaaacaaccaacgagaatagaaacaagtcagttcagatcttgggagttaaatagacctatgtctcaatagtgttgatcatgccacaggagcaccaattttatttatacaatattagtgagcctattaagagtgacaagtagggatgaaaatgaaatggactttatggtcgtaccatatctcacgcctccatttttccggaacttgaatttgaaaccgctgacgatacaacacatatatagatgcgaatatattgctttagtttaggaaaatggtgtgaagccgaagttgcgatagatcgaaaacggaattaaaaattgttggatattactggtgtatagacttggagaacgcaaatccattattagaaaaaagagtagccctgtctccagcaatgagcagagtagcaactcaaagtgtaaaccaatgataaatggtcttatgcttggggtaatgataagttctcctctcagaaagtttatgctataaactttaaacttcatgcatgtgcaggcccctgcctatttaaaatggatctagaagagtaattgtactatgaaagttcaggtttttggttggcttctattgattgataggttaaacacttgtgatatgcttgatagaaagtcttgtgcccctgatggaagtgatttaacctgtgtgttatgttcatctagagaaagagaaacccttcaacaccttttttcagtacagagtgttgggcgcagtttggtatagtctgtaatctctctttgtcctttgagaatatgttgaaccatgcaaggagctcttatcgatcttcgcacttcttagagaaagttttatatgcagcttggaacatctagaagcaacgaaatggatttattttttataatgctttgccttctgttccctcttggatggcattctttaagaatgatctatcccttcttgttttttgcttaaaattagatgagagatcaactttaatctcctggttaaaccaattgtaatactattttttatatcttaataatatcctttaactgtgggggcttcccctacagttctttcctaaaaaaaaaggtgtaaaccaatggatttcatggcgatagtccaaagcatgtaaagatatttagagaagaagacaaacttttttaagtgtgtgccatattggcatatcacatcctatgtatcaccaaaccatccgtttttagagtactacaatttagtgcacacccaacactgcgtaagcatatgcatgttctttacataagcttgaagtatcatcggaggcatcaaaatcttgtagagctcaggcatatgcatatccacttagcatgtatttggtttaagggttgagatggatcggattgggttgaacttatgtttcagcatatttgactagagaacatgtgggatgggatggtctctgatagggaatattcctctggtgaaccaatccaacccattattttttcttgctgacatgttgaccatctcttagcatgtgtttggtttaagggttgggatggatcggattgtgttgaacctatttttcagtgtgtttggttggaggacagatggaacatgatgattgctaaaagggaatattccactaagatctgagttcatcttgttcctcaaaaccggcaaaccaatccaaaccttttttttctcttgctgacatgcgggccatctcttaaaaagtacgatcaccctatcccatatgccaaacgaatagataagaccatttcatctcaaaaacagggataagtccaacccatctcagctcattctcaaaccaaacacatgcagtacacacgtagtcctaaaattggtggatactaatgtcaaatcatcaataaataccacccctaggagtacggtttttctccttttttttaaaaaaaatgttttgctcctcgaagtaatgacacgtgtttctatagcgctagtctagaattaaaccctattgggttgagtgctatctctggccaaccagcttctgatccaatgctataatcattttttaaccacataaagattcaacaagtggaatataatatgtcacctattgtcatcgttctagcaacggtggaatagaacatttcataataatggaaatagtttcaacttctacattaaatatgcatttggacattacttattatgtaactgtaacacaacattgctaaatgaagaaaatgcgacatcaaacatagcttgaaaatcgtcacaagatcagttcggaataagtttgcacaaatcctactacaaaatttccatccatgcacaacaaatgcgcatgtgtatgactactgtctcaagattgcgacgcaccatgatggtatcctaccatgtttggggagcttaagattttgagaaacagttggtaagaatctggagaatttgggaaactcagcttctggcttctagttcaatttctggattctacaactataacttctcagaatctggataaaaatttggactgttttggggggcttctagcaactggaaattccaggagaagtcatgggcctgtttggtacaactccaactcctaaatttagctccaggagttgggtctggagtggagttgtggagctgcgtaaacccagctccacaactctagttcattttgtgagagagttccacccagctccactcccagttttggtggagctgaaactgtttggctgagctctaggaggggtggagctggagctggagctgtgccaaacaagccctgccagaaactctcccaaacacaatgcatctcaacttctgcgatccatcagagatatcatcgtgacctgaagatcagtcatgtacaggtgaaccattttatccttagcctgcatactgttcttcagtgctgaggtcttcactattgctgcatactgtgtgcccatgtctgatgattgtgattcatctagctctgttcccatggtttccccatgtagtcatgcccctttgtgagaaatataaatggagcacagagggtaccatggatgttacaactcttcctcacaaacttcagagttcagaataaagctggggaataccatggttatgtccctgaacacaaagtgaacaatttaggcatcagaattacaaattttatgggtttgttcactttgatgccaaaattaacccttccaaattttggcaataccaaaatttggccaagtttggtagggtagaaaagtgtgtgggtgttgtttggtttgttactatgctaaatattcttgtatagtgttatgtcgagaggtttctagaaaatcaccaaaattttggcatggtaaggtatggtggagtatttgggatgtacttagactgctaccttgccaaaatttgacaatgctaaatttgatatggttgaaaatggtaacaaactgaacagcccctatatttagtgataaagtgatgtaaaacagtaaaacgtaattggagtgaaacctgaaacttgtagacagacttactttaggtatggaagagtcatgttcttcagcaaagccgggtttttactcgcaaacgttttccattcatcggggtcgatcttcccgtcatcgtttaagtctgcttgcttgaacgtctgtaaaagctcaagttagcataaaggttaatgatatgatttattcatgaaagcagtggcaactttgtgaaagaaatgaactgaaatctgctaaaaaatgcctgggaaatagaaaaactgaaggtagtatttaatctgaatgcacttaacctgatccacgatttgttctacagcttcttcagataggaatagatctgattcattcagaagagcaagcaccatttcgtgcaactgcttgattcataagaaagaaaaatagtttcagtaactccaggactgtcagttaaaacggtaagacggtatgcatattattttccaacggtacacatacaaatttccagtttttcacactcagccagtttgaattgaggcttcttatggatatgtaaggatttatttaaattaaatatcaactggattcaacaaatatttggaaacacaccatttatgtttctttgatggtatagatgtgtaccgtcaccatcagttctgtagactattaatgcatggaaattactatatgttgaatcatttctacacagtatatgggtagcatgtttgatttatggaactaaaaagatgataagtaattctaatttctaaaatgcatacctcttcacgttcaatgcatccagttcctctcaggtcatacaacctaaatgcaactacaaaaaagaatactgtcaaataccaaaatggcataaacagaaggtagttattaaagaaaacaaaatcaagatggttaaattgaccatatataatgagaaagagctggaactccttacaggcaatcttgtctcccaaaggcgtttccgggtgaaaaatgctgagggatcgaacgaactccccgaaatcgataacaccgttgcgcttcagatcaaagagatcaaatatctgcacttgtggtgaaacactgtcagcattttcacataagaacaggttctacaattcagccaaacatatgtagaactgtgcttcttcagataatgcctttttgcaccaatacatcatggtctatatgttgaaataaaatccactgatgaaatggactgggtatcactgctactgacccgattggcgaaaaggttcttcttgttgctgttcctgaagagagctagctggaactcctcctgtacatggaaagggccgtttgcaattgacatatttttcatcagaatttcagagctacatggtcaatctcacaagtttgagcagattttttaagcaagtaccttgtgaatgagaccatctctgaatatggaatggcttatcttcttgaacagctcaaagagggcctccacttcactcactgaaactgcaagaagaatagcaataaattacaattattattattcagggtttttccaaaagagaacctgtaaatatttttccatggtgtatccagtgaatcaaatcctacatgtagtctctttggccagaatagcaggatcctcatgttgtgcagctcttttgaactgctttgatgatacacagcccattttatacaaaccacgcccttaatttcctgtagttacaaactttcactgcataaagtgatagatggaacctaaaacaaaatggagaaaggcattgctggcatcaacacaagaaaaagtgaagccacatgcaaaaacaaaacagcttcagaaacacagaagaatctaacctgggaaacaaatacaaattcagatcttgttttcagtactgaagttcaacaagaggatgactatctagtagctacagagacagctctgtacctactgtctttcaagcttaatgcagaattgcagatacaatggacagagggtagaagaagaggaggaagatgctactatatgtgcatatatataattcatctgcacatcaatctgtcgtaacaagagttgaccctacaggctccttgcaacatcaatgtaatgttttattgttcatttcatcatcgatctgtcactgtttctgaagagttaaaaatgctgagattaaattaaccaaggctattctagtatagtttacaattgtgtcttgggctcttggcctatatggagaaatatacgaattaactaatgagccatatgctcgaggattctttatgttaatgtcaagtgacgccgattaggttaagatgtctacgagtttgtgcttgatgtaaaaaaaagtgtcaaacgtcatcttgtacacatcaaatggtttgtttatagatggactggatgtctgaatccaaaggtgatgcatgatgcggctagatgatactcgtagacataataataacatatagttctcaaggtttgtcccaaaaatataataattccgtcaccagcattctccttctcaattaatcacaatcctccatcactaaattttctcacatacctccacttcttaaccaattacaaccttctcccatttaattctacctattttcttaatacttatgtttaaccccaaaaatccttatattctggacggaaggagtagttgatagaaggggaaaaacttagcaatttaattatctgaaggaagtatgcagcattacggacgaacacaacgtcagagacgcatggagaagacatcagctgacgaggccaacggttggcagcaagccggcttcttggtaatataccaagaaaatgggatgaggtatcaagaaacgttttgatcttttatttggctatacatttctgacagaacaaaggagttttcctcttatttttacgcttaagattcagaaaaagaagggttgtaccctggatggcagtatttaccgaaatacagtgagttgcaaaacttttaattttcacataaagagtaaaagaaattttaacctgtgatagaaaaaccttttggggtactaaaatagttgaacataaatttttttccagaaaactttctattgaagactataaagttttttattgaaccgatgcaatgactcaacataatcatgagaaaaaagttgtcttttgggcaaacaaatttgaaaggaatatttttttactgttataaagaactataagttttttcagcttacggtgcttgggaattatacgagatactccctccgtttcgaaatgtttgaggcccttgactttttagcacatgtttaaccgttcgtcttattcaaaaaatttaagtaattattaattcttttcctatcatttgattcattgttaaatatatttttatgtagacatataattttacatatttcacaaaagtttttgaataaaacaaacggttaaacatgtgctaaaaagtcaacggtgtcaaatatttcgaaacggagggagtacttcttaaggtgcttgggaatctcttaaagggtaatttagaaatagaacataatttaacactcggttttaagtaaaaaaaatcaatctcaactatcctaattgctcgctgctaattgaataaattccatcatgttaaggtatttagaaaatctcatttgatgatggccatcagatccaaaaatacaagcagattcgatgtaatcaaggtctgactatcctcttgctaaaagcaactccgaataatattaagtggatcccaataatatgtactgcatcgatcgattaaaaccttgtatttttcaagtaactagcaagcatgcccgtgcgttgcaacgggtaaaaaaaaacataatgataatatacgtttttcatgcataaccatgtcgatgacaatcagaaaattggaacatcttaaatgtaatggcccaacctcgatgatggcaatcttacgatgtttgctttacctaaaataattggattattcatatgacaacatgcatataatctaaaatattcttttaatctcattcttgcaaccaatcaaatcctacgctgcctcgtatggtcaagtatacacaaaatagagtcattgtacactcttctttaaataacaattaaaatatgtttattttctaatattatttccatataatatgttatcaagaataatagctacacttcacaaaaatagtctaataattgcctacaaagatgtgcaaggtctccaatataggagaatagattgacgaaacacaagtcgtgtaggagatgaaaaaaacactggatcctatccgaccaagtgtccatcaatttagcgtttttttctaacagttttttcctcgtatgctttttattttttttttgctttttttacatacgatggaaatattttttctcacgtgtttttttacggattacagaaattttttctagcgcattttcttttgcgcttttttttgacattttttcctcacgcgtttttttaaaccgtttttattttctcgtgcattttttcttttttaatatacggtagaaacttctcttttaaaatagttatattagattagattcgagataaagaagagatataaacggactactaaaatgacgaatagaaattagagtttttttctgccggcttttttctggcctttttattttttttttctcatgcatttttttacgaaaggtttttttcgccactctcttgtagtgtcggacctttctagatataataggattcgattttttttttactttagaatcggatattttttttattttttgcgccctttttttactgtgtcaacggagccggattcgtttcgattttttttctgtttttttgccccgctttttttttatcaggctgatttggtatttttcgcccgggttttttttcgccccatttattttatcggacttttttttcacccggtttttcgctcgttttttttcgcccggttgattttttttaccacatcacatataattcctttttacgtggaatcggacatttatttaaaaaaaattacccttttttttaccgcgtcgatggagtcggattcgttttgattttctttccttttttccccttttattggatcagacagatttgtttttttcgcccggttattttttcgctgatcggactttctttttccgcccggctttttctctcggttttttttgccggtttttttacggacgatggaagcacctcttattttttttaaagtataagtagagatagagattaacggatacaaatttacttatctagcctttcatctaatcttgaaagtgatacgtggcccacgtttttaggtacgttgtgttggaaaccgttagattacagccaatcaacggctatcagggtttccaatcccactaaaaaatctactggaccatagcttcatttttcttttcttcctaatcagtaaaaacttttctatccaacagaaagttttaagatgagctacagagacaaccagtactataaaaacaagtaatcaactaaagaaaacgtaaaaagtttctgttgtgcggaagcacaccagcaccccttaccggatgcaccaaagataaaaagcaggagcacatttacgagttaagatttccgtgttatcttcaaaagaaaaaaaagaaaagattaccgtgttaattaacgaaggactatcaatctctcctcgttagccatgtatgatctccctccgcgggataagatcacgaatcatgattttactgtgctaccagtcccattgccgctaccattgggcaagaaaatgggagtaaaaaacaaaagaacaactcgcagaatagttatcccagctgtctgccatgacagcgaaccaatccgtcactctcgatacatggcctgtttaggggaggtttagattctgagaagcagctgtttagtagccaacttttaaaaatctaaaaaactctgaaactcagcttctccaacttctagcttcttaattcatttttcagaatatgtaactacagattctcagaaactatggattgtttagaacagcttcggctagctgtaaactgtttagggcagcttatagcagaagcagcttctaggaaaagctatagctgggacaagctcccccacactttctgttcagattctgaccaaatgaccgatcgagttcagcaccatcgccatcgattgtacatcgccatcgagttcagtagcatatcactgcggtgacgtgttttaccgtcgaaagaaagaaaaaatggggtctgatctgaggctgctactttgatttgtacgaacgaatccttgacttcgcagcaccagccctaccaaactggtactctcagcctattttttgactcaagtactgcaagggaggccccagtagtgtggattttctttattcagagggtagaaccaaagtacaaagggaaaattacaagtcattaatccaaaaaaaagtccctctttataggattcaggcgaacggagaggagttggtcattcttgtaaagagtcctccaattttgggccaaaggtgttttgttcttaaaatttttgcaatccctttgttttcaaatatgccactctgcgaagcaagccgtattgctactttctctggcctcctttagcatctcacccagatcaagaggtattccagtgtattgagatcaagctccagcattgcctgctgaatgggcaatcaaaaaataggtgtaggaatgtttccctgtatgttggtcacaaagcacacatgtcaaattactttcttcaggtgcacaattcttcctatcaagcatgtctttggtgttcagcctgtcaactaggagtggccaaccaaacgctttttatcttcattgtacacttggtcttccagatccatttaagtgtggaatctgttgtgtaaacatgaagttccttgcataaactttctgtgaagaatatatatcatttccccaggtatacacccatttatcatactcagagatggggctgtaattgaagtccacaaattgcatatgtggcatctcttggtgtgcttgttccgacaggggtaatgcaaatgccaaatggatgtctttttgtaacgccatagcaattgactccagcattattctataaaaagaaggccaagaaatatcacgattttcaagttcattattttcacaattcctgaccaatctcaagggtgtatacagtatactactgtatagtatgataaaaaaaaacttaatttgtcaacagatggttacctgacaaaagaaaaatgtttcttatggctcatttgaaaaggaaaacccaggaaaggaaatttaacatttctgtcacagataatatagttctggggtcaaaccgaataagcatattctcaagtgaaaatcattaaaatttacctgcaagttgaagaaaataaaaatacatacatcagtttacttgcagtgaaccttccatggatatcagactcaaagttgtttatcttggcaagtaaacatacgcagaagcttttgtatcaagtatcagcctcattacaaaaagtcaagtggtaataggaaacatgacttaacatcagaggaaaacatggcttggcaatgaatgatgtgaaattttgtctacaaaagataacttatcaattatccactacttggacacatgactaatacccaattcaatactagcatcttttaatccattcaagcgtgcaaaaatgtttgatagaatgaacagaacataacaagttaatcgaatgaatatacaaactcaccagctgaagctggaattaggtatacccccatcctaatcttgtggactgtgctaaatagttgacataatagtgcgcattacccaccagctaggttcatatcatccagctgcaattataacaaacctttccataccattaagtaaatatgtggtagatcagaaggatctgtacaattattcgagttgaatcattaactaactcatcacaaggatcttggagacatacatacaactttagagggaaaaaaatctatatttatcagagagttacaaccctgttaaccagtaagcatataagtgcaaaaagaaaggaaggcaagacttctaactgaaaattgcattgatatatcacatgctacaatcacttttacaccatacaaagctacatcaatctgcatttaatcagtcaagtataaccattgtccatttcaagcagcaatggagaatccgattggaacgatgagcaggatgctgcgcagaaagcagagtatgcaaggccatccaatttctttaattatactgcctaatcactaggaaagtatgaatgtgaaacccccattttcttaaagagtcagaggtatttatccttgattaattttagtatctcctcaattcttttgatgattttagggttcatcaagtcccttgcttgcctaaggagagtgccttctctgctgttataatatgcatcaacaatagcactggcccaagtgtgtaatacctctggactcctgcaatccactaactatgtcaccaagacttgacaagagaaaggaagaacagccacagaatctattatgaaagggatttcaatatattgaacacttacgtgtataatgtatcaacattatccccctgaagttcaggcccaggagtaaatgcgtcattcaatgcactcaagcgttcttctggatcctcaatcattataagatgctttagtattctgatatcctttggcatttgtctctggagattggctactgcagtcatgtatagatgaaacattatatctttagcctgcacaatgtattgcattccagtgagcactcaaactgatgaatttgtaaattaggtacatatatggcatagctactctatgttccaaatggtacttgaatgcttttctgttttacctcagattttgtgatgtcagtaccctttgcagctgaccaagcttttgaaagcattaagactaacgcagaatccaattcctttttctcagctaagtcatctatctttctgcatgcagcatccacggaaggtgaattcagtatatctttcaactttaattcagcagcactcagagcttcaagactcccagatgtgtcatcatgagcttgtagagcatctacacaatcatttccaagttgtgccaattctgcaagcaaaccagtcaaaaaggaaaatgataagctcccaaaatactaatggctgaaaataaagggaaaaaaatatgttccaactatacaagcaagtagacccatgctacatattgtacaatagcatgatatacattcagtaaggactgagaaaactagaaaatagctgttgttggtggtgtagtgtatctatattcctcgacatgtgattcatatgggaagttactagggccttaatacaaggaaagctatgcagagtaccaacatatgttacaataaaaggccaaatgttgcaaatagacgttcttgtgtatgtctcacctctttgtttttcagggtcatcatgataagactctgcaacataataaaggtggttgaaaaattccaccgtgaaatctttatggcgcttagcaataacagaaccaatttcatcagatggtgtagattttactacttcaagtagttcattatgcctttgtacatcttcatctatctgaaaagtgagcgaggaaaaaaactgttatgaataaaggctaaatttaatagttgaaataaagcatagataggcttcctggaaaccactaaagtgaatcacctctttcagttttctagcaagcctgagaagattgtgcttcatctcagggtttgattctgcatctgctctttcctgacagcgtttgaaaaaatgtggccttatgttatcccattccctgctaaaagacaataactttctccaatctgttggtgtaggcttatcgaccataaatacaccaattaacttgtcagatattttaatcattttttggttttctttagacgtctggtttgtcttggcaacccttcctgccagattatcttcatgtgatgaaatactcgtagcaacatttgtagatccactgcttgagggcatgttttctgtataatcctcaggaactgctgtcacatcaccaactgcttctagattagaggttcgtggttggcgttgactaagaaacaggtgacctgtgatcagaaaataaacacattgagggtaaaaccttcaaaattagatagatgccccatatacaaaaaatctatggagaccatcagatacaagaatagagccattacagatggttacactgtggcaccatgcagtgattcgtgcatgcctaataggttgacacaagagagactaatgctgagatttgattgtttcattgggcacatggtaaatcctgaagggatcaaatgccagcaggataaagacttcgtttcaagtggtaaacctgaattctaacacacaaaaactagagcaaccacagatagaattccagaatatacagtatggtcacaggaaacaaccatatagggcatatgcatgaactattgatgctgttaattttcaagactattgaacttatcagtaaaattttgcacctacaggagtactacagaagaagaagaagaagaagaagaagaagataacacggcactaaaaccttaaaacttatagatgttgaaggaaaacaagaataggctagcagaccattagaggatcacaaagtaagttttggttacagaattggttaatcgtctagtttgatctagtttcagagcagattgattctcaacaaaggactcaaatcctcagtaaagttaaacatcataccagcaaccatatttacgctaaaccttcgtcctcactcatcattgctatttacacagcgctattaatttgaaattcaaaatggaaaagaaccgaaaaccatatgacgctgaactctccccctgtggtaagaaacaccggactcacgaccgattcagaaatgccaaaaaatcttaatggtacgagctccaatcgtatgcgcaccataagctattcaactggaagtaacggtggatctacttttgagctctaattgcaacgattcccgctcaggtgaagtccaattttgcaacaactcacctttggaggcgacgggggcggcggcggcggcgccatgggagcggaggcgacgggcgaaggagagggtgcgggcggcaggaggtggggtgagcagggggaggccggtgggcggcgcctggcaggaaggggcggccggcatcgccattggcggcggcgagaggaggcgggcgtttgctagggtttaagcggaggcgtacaagtgggggcaaggagtggctgggtggataggggagaggtgacgacaccgcgagcgaggtgatctcaccctctcgcctcatcactttctttgtcatcttgttgggttctgaattgcgaaacacaccctggaatttggaagaatctacaaatcaggtgcccgattcgtagtaaaaaaaaaaaagttaattcgctcgacttggcccgtatcgatttgttgacgagctaagccagattcagctaacgagtcaaacacaacagcccaagtatccaactatctaacagtgatgtgttaatatgaccctataaaaatattaccatatggcctaggcgcccagcccatcaaggaaaaaaaaaaggtaaaaaccttataaggagagaagaacatacaggacacctccatccctctttttagcacactcgttcacttgaatatctgctcctctttgctctcgctttcacaccgtcaactaggtcacattgttgaccgcttataggccgtagcggcaccaagcccccaagcgtcaccctattatctttgttggcctcccaccatcgctaacccttcacctcagttggccccagccactagccctcttggccttgcctctgtcagccctggccactggtcctcacctccggcaacaccaagttctaggccctcgacaaccacctgcccagccagagtctgaaatgttttgatgcaatgttttttggacatctattatctagccaattgtctctccgaaagagggttttctgtccattgcccagggtgatttttatgcaggcttggaaaaagtggatatccactgcattgtaagggagatccatttgttctcaaggcctggatgggtttgtccaccttagccaaatccatcttaatcttaaggccgaggagaatttttatagatctatgatttcaagtccacccagctactttggtctgcaaacagtttgccaattcaccaaactagcccctagcttaacattttctggctcctcacctttccaaaggaaagcccttatgagtttattgattcttttgaaaacccatttaggtattaaaagagctgacaaatggtatattggaatggaggacatgactaattttaccagagtttctcttcctgtggagctgaagaatttgcccttccattctggaattcgcgatccactcttttcaattaaaggtaggaagtcaactttcctaagctttcttaagtgaagagggagtccaagataacttgttggaaaagattgtattgagccaggaaaatcttaggtgagtgattgtacatcaatgttgtcacaggcaattggcaaaatctacgttttttttgcacattgttatttaatcccgatgccttgccaaacacctgttagagattaagctttacgataacactcaataacccttgtggtccaacacagaacatcgatgccgggcctcaactaaaccctatcactgatgaggatcatcggtgacgggtgctcacttaccgccagtcactggtgctttcgtcctacgtaccctagctagcggtccgatgacaggcgctgacgttaatctgtcactgcagatgtcgaaccaccgccttctctatccagccggtctatctggggtgaactttctcctaacatcggtaattcactgtgccagtgttatcgcccatcgcccgtatcttctggtggcttgtggagtgggattgggagtgggagcgaggatgggcgaaagtagtgggtagcagtatggctgggttgattgatatggagtacaaactaagtgtagcaatatagtactccgtccgtcctaaaataaatgcagttttgcactattcatgtttaacggttgacggttcgtcttatttgaaatttttttatgattattatttttattattattagatgataaaacatgaatatactttatgtgcgactaattttaaaacaaattcataaaattttcatataagattgatggtcaaacacggattcccacggttgtacttatttaatttgagattgaggtagtacttaataaccactaagggattataatccatcttaagactaggggttacttgcgtatctacagttgactttaactccgtgtgattataactacacatcagcttgctggccagcctctcccatcaagagttcattatgcagcgtagcagtagcactcttgcggtgatggtggtgtcgtttgtagtgctgctcgccggtggtgcaggcgcggcggccgccgccgtggcgcagccggtgccgctcttcgtgttcggcgacggcacccttgacgtcggaaacaacaacaacttgcccggagacgaggacgtcggggatcctcctcgcgccaaccacccttattacggcatcgacttccccggcggcaaggccaccggcaggttcagcaacggctacaccatggccgacttcatcggtaggagcagtatatgcatgtggacaaaacgtctataactttttcgaaaaaaaaaacacaatcatgtacttttttctgtctacaaatatatgctttaaatttgatccataaataaaaccattgctaaggtggtgtttggatccagggaaactttagtctttgtatttaaacactaatttatagtattaaatatagactacttacaaaactaattacataaatgaaagctaatttgtgagacaattttattaagcaatagattcgtctcgcaaattagtctaaaattatggatggattttattaatagtctacgtttaatatttataattagtgtccaaacatcccatgtgatagggacttacaagttttagtctcatctaaacagggtctaattatatattactagtcctatgaatcatatctcgtctaaatttcttcacatctcttcatcccaagcatccttccaacccgatgcattttatatttcccaacaaatggaatatacattagttattaactgttagccaagaaagtgaaatgtttgagtatgttttgagttttgactagtaatgcacgtccatgatgcatatgcccataagctcatttaattatacatgatatgtatggcaatgcggttgaacgcagcaaagtacatgggatatgagatgagccctccagcttacctgtctctctccggtccggtcaacatggacggttttactggagtcaactatgcttctgcagatgctggcatacggaactccacagtgagtcaactctactccttttttcctttttaagcaaaggagcttagagacacagtacgtcagtaccatgtgaaggtgttttttaaacacaaatctacaccactattattgtcacatatcaaatccttatatattattgtgttcattactgatttaataagatttggatgtacgactagtttgcatacattaatagatgatcttttaagaactgagtgagtacaaaataacacatattaaagctacaccatgggattttcgtaattaagtatacatgcacacgttattaagaaggttacagttaggtcaagaattttacgttggtctctattttctaatatttcttccgtcccatattataatacatatattttttataattaaggtatttaatgatattttgaccattatttattctacgttatgttttcaacaaatataaaattagtatcacatgaaaaatactttgaactgtgaatgtagtgatataacatatatatatatatatatatatatatatatatatatatatatatatatatataatatagcataatatggttagtatgattattaatcaaaagttaccgagtttaatttttcttaaaaagatggtgtccctataatttggaatgttaggagtatgtgttaggggcacactcacatactcggtgtccttcacttgtatgcgttctgtgtgtctgtgtctttcatccatcatatatggcgtgacaatgtcaatgttatgaaatcaaatcgcccaataatcagcatgatgcatacagaacgcaggcttgaccatcccactgtcgaagcaaatcagctacttcgccacgacgaggtcacagatggagtccaagctggggcgcctcgccatgagcgacctcctctcgaggtccctcttcctgctcgccgtcggcaccatggacctcctcccggactgcaactacttcctgacgttcccgccgtcgccgccggacaacaagacggaggtgcagcggctcgtggagctctacaacgccagcgtcacgtcgctatacggcatgggcgccaggaggttcgccgtcgtcaacgtcggcctcgtcgggtgcgggccgacggtggacacgcgccgcggtggcggcagcggcggcggcggcgggtgcgacgcgaggatgaacggcctcgccgcggagttcaacgcggctctcggggcactcctcgccggcctccggtccgagaagcgtcgccttcgctactccctcgctgatttctacgccttctccaacgccaccttcgccaacccatcggctgccggtaaatcctgatctctcttctaacgcgcacaaattaatgacaccattttgtcctcgcaaaaaagaaaaaatgacaccattttggatatcaacacacgtatgctattcaatatatttgtaactttgactgttttatttctattgtaaaatgagacctttttatgtgcttggaattaattaggatcgttgatctctaatgatctaacacttcaaagagagaaggtactaggagataggtattaaaagggtgggctggaagctggaaggttaaaatggtaattgagttttattaattgactagcaaaagtgcccgtgcgttgcaccgggtgattacggagtgtgtatattgaccaaaagtgttgtttggtctagcaaaagtgcctgtgtgttacaatgtgaagcgtacagattagaaaaatatgcaattaattaaaatacaaattcgctgaaatatttggtatttttaagtaggtatgtgtataattaaataaatttacaagtaaagcaagtgtgagaaataaaatgacatggttaaatttaattttttttaaattctccatgattagttacactctttgaaattatatttgaatttttcagagcttaattgttaattttattaatacaaacgtcatttaacaattatttacttggaaaaagaaagaaaatacttccttttaggtttgcttcgaaataaacacattcaataacttataattgtaatgcttctgaaaaaatgagcactaaaaatgaatttattctctttttttgggcctgagggacctaaaatagacttatttccggcccttgccggtcggtccacggccttttgtgcacgcacaagtgcacttcccctccccaggccacaacctgggcttgggccagaaaagtggcctcactctcgatccctcttgggctgatttcggcctggacgacaccgatcgtccgatctttagggttttgatcggacggccgagcgtcgatatcggggaaacaaaacccctccttctcctcagccgccgaaaccctagcccatttccctccctcccatctcacatcgccgccctcccctccgcgcccccgagcggcggcgacgacgcccctcttcccgcgagcggcggcggcggcgccctcccccacaaccaacggcgcggcgccctctccccgaacaacggcggcgtggaggcggttgcggcccggcgggagcgggaggggcggcgggccggacctcgcctccgccagatctggcggcatggaagcggctgtggtctggcgagggcaggagaggcggcggcgtcgtctctttctctctctctgtgcatggtggggaggtgcggcagtggtggtggtggcggacgtcatggaacgccggtcgggcctcgcctccgccagatccggcggtgtggaggcagctgcagcccggcgggggtgggaggggcggcgggccggacctcgcctccgccagattcggcggcatggaggcggctgcggtccgacgggggcgggagaggtggcggcgtcgtctctttctctctctctgtgaatggtgtcggttctcctggtgatgctaaccgaataggacttggtataacagatgggagtttgtttcctatttttgtggaatcggacatattctttttttttcccgatttttcttttaccgcgttgatgaatcggattcgttccggttttttttcacccggtttttttgacggacgatggaagcacctcttattttttaagtagtagtagagttgatgaatcggattcgttccggttttttttcacccggtttttttgacagacgatggaagcacctcttattttttaagtagtagtagatttgtacggctaaggacaaaatcgtcttatttttatatctgtatcctactcctatccgttacaagacaagctgcattcatgcagcacaggaggaagaacggtgtgcttcttttcgtagttaaacgtttatatcatacttttaccgatatgtacatatacatctgcacacctgctcaccgccgtacgcgcccgccgctcaccgaggccgcacgcgcccaccggtctcagccgcttcacacacgctgaggtcgctgctgttgtatgcgccctccggtcacagcaaactaatgcggcagtcggtcgtcgtctccgccaccgcacgcgcctgtctcggccgcccgtcgtagccgacgtttgcggtagccggtcgtcatcaccgccgccgcacgctggtcatagccattgctcgcgccagccggtcgctgccttgcacgtgcttgctggtcgccgccgtcacgcgcgcagcccctgctccttgcatccgagctcgttcaattgggattggagttgattagggttaagcactgaaatcgtggaaagggaatcgtgaacactaggcaacggatggagaattggtgattggtcaattactaatctatcctttgtagtaataatttttgttcctaaattaccctttgtgaattaacggtggataccaattgatttaggaggcaccataaaagaccgcttgtaaaatatatgaaaattatatacgatcatacggccataagtattagtcagttaaccttttttattatcaaacttccaaaagtgtggccatgcagatatttaccttaaaaaatactttcatatataacgcccataaacgtgggttttgtgaacttgtttaaataaaaaattatggtcaaattggcatattgaagactagaaaaaaagttcacacgacatatatttatgaatagaatgattagttttacgaaaaatatgttttccatatacgaattgcacccgtccaatcgaatttttttttaaaaaaatagtggcgtaaaattttttaaaaaagttttgtcagtctaaatttgtaacagtttaacttagcatttttctcatgatcgaagggctctaatatttcattttattccttacctctgatttctccaagctctgaatttctgatacggctcgttataattttgcagggtttgtgaacatcgacagctcgtgctgccccgggccttgcatgcccttcccctacttcaaccaaccaccctgcgacaaccgcgcgcagtactggttttgggacgggggttacaccacggagcaagctgccatggtggctgccgctgcgttctacaatggcaccgcaaagttcaccacgccggttaacttcaagcaactgatccgaaggaaaaagtgataactccacgctcgatctcatgtagcaaggcacggcgcccataaaaaaaatcttacgacattcgatcaataataagttaaatgttctcctttagaatggaagaattttaataagaattgatacaattactgacatttcaatggataagtggtttgtttatatggattttgctatcttcaaacaacattatatgtaaaggcgtggtcaagatccctagtcaaactgtttttttttaactcatacttcacacaccgacacattgtgagtggacttagtacacatttacactgtgtgggaaactcctagtctggttaaattcaacactactacaaagggagtcttttacccctatgctattaaaaaagttgctgcttacctgtgtgccacaaaaaagtttggagtcacctgtatgccatgagaaaaaactttcgttgacccgtgcgtccaccttctgttagaacttaacagttccatagctctgacatgtgggaccatgtataaaaatgactaatttgcccctaaggattttcagctctattctcctctcccgctatctcccgtgagtgcctgctctctccccgttgcgctgcaagccgccgcaccctaacctagccgcacgccgccgccgcctcgcctcgccggagccggagccgccgccgcctcgcctcgccggagccggagccggagccgtcaccgcctcgcctcgccgaagccgtcaccgtctcgcctcgccggagccgtcgtcgccgccaccgtcaccgtgcgcctaggccggcgcgccgctgcgccaggccgtcgtgcctcctcctctcctcctccagggcccacgcgttcccgcgtcctccctcgtcgcgcggcacgtgggcggcacgcgcggcgggtggtggttggttcgggagggcggcgtcgtcgtcggtcaccaggtggtgcggcgccgtcgggccctccgtcgatggccgccaccgcagatgagcgagtgagatatttgcggtggtcacgtgagattcgaatcacgatgtgctagctgcggctactgctctcgtgctatctctcgatctctcgctctcgctcttgctctctcgtgtggggtttcgagatgcatctgtatatggtttggagttctcgtcttttgcgagaaacggaatttggaattatgcgattgcttttggaaattggtgccctttggaagctatatgtgtatgcttgattcgaagcattaaataaaaaaaagggcatatgcttgttttcatgtattggacaataatacctgcccacatgaattcctgtcactcacaccaaactacaatatttgattacccgttattttttggtatgcaatggtcatacacctgtttttttcttttttacaaaatttatttctgatttttccttattttttccaccattttctaatttttcccacattttcctaatttttcccggatttttaaacatttttaaaatttattctcactttttctgatttttaccttttttaaatattatttttcatttttctggtttttaacgcttttcctaaattatttttcacttttctgattttttaaacccattattgtacacaagggcaaaactgtctttacacagcctctaacacctctgttatgtctccatccatccaaaatggcacacgggtcaacgaaagttaggctcatggcatacatgtaactccaaacttttttttgtgacatacaggtaaccaacactttcttaatagcatagtggtaaaagactcccacaaaagtgttaatcaccgtaagcttcccacctaagctaacatggactagttgatgcacgaaccgatagggttgtattaatatcggtttatgacataaactggtagtgatatgcttcaatcatatttcacgttcgtaccacaaattaactgaaaatgaactatatgctgtgacactaactagcaactgacattattcgagagcaacactattcactcttcactcccggttgggaaacccctttattactcccggttatacaaccggaaccacgaatccgggactaaaaatacccatatttagtcccgggtgaaataaccgggagtaaaaatgtatttttagtcccggttggtgttaccaaccaggactaaaaatggagacaggctagttcagttgctccttttttttattgtttttaacactgaatgttgatttcactccattcccaaatcatccccaaatcccaaatcatccccaaatcgtgaaattttaaatcgatcatcacatcacagatcaaaagaatccttcaaatcctcaaatcaatcatctccaaaaacatcataaattcttaaaaaaattacatcacaagttctaaaaaatcaccacaaatacatcacacacaaatacatcttagatctgaatcaaaatcaccacaagtatcatctcacacacaaaatcaccacaagtacatctctgcacgccggctgccaccacgccggccgcccgccggcggatgggaggggaggagggggaggagaggggagaggagaaggaggaagtggagaggaggatagggggagtggaggaggaagagataagatcggatctaaggggaggagaagaggagatgatccgttcttatctaaatatttcatctgggacttaaccgatcagagataggagaaaatatttactcccggttagtaactccaaccgggggtaaagataaatctttacccccggttgttagtaccaaccgggactaaagatctaaatgatctttactcccggttgatagaccaaccaagactaaagtggtaccaaccgggactagagatcctcggccccctggcacgcatctgacaagggatgaaccgggactaaaaatcctctttagtcccggttggtactaccaaccgggactaaagatcaaaaatttttgaaccgggactaaaaacaatttttactgccggttcttattggaaccgggactattggggaaatcctccaacccagcaaagatcacttctctagtagtgattacgaaaaactcagcggtaaccagtattaggatatttcaaacaatcaaaacaaattctcaaaaaaatcataacattcatgcaatgtatatataccactccataaagttttatgaaaagttttatgaacaactttaactcacatattgagaaatagaagagacaaattcaacatataaacagtagtggtaatattgatatccaaactttttcatttatttagctcgaagatcgagtttggacttatttttttagtgagatttttctatactccattaatttgccatctaaaaaggagagatcaggcatcgccaagggaagatcaagccttcaagatcaccaaggcccctccaaggacgccccatgatcgcctcccaatcgcctctccgtgaaaattgcacgtttctgtttactgtcgatgtacactacgtctccatttaataaagggactatctacaaatcattcgccataaaacgaacccaaacacagtcggatttttctctactgctaatccatacctaacgactcagtggacctccaactacgtacacacttttacgattaattaggaactagtacgtattttattttttaaaccatatgattaataacacatagaaattacaatgtaattattctataactagtaatataagtggtatgtaattatagtgtaagtgatatgtaattacattgtaactgtagtgtaagtggtatgtaattacgttgtaagtgtagtgtaagtggtatgtaagtatggcgtaagtactgtaagtacctcgtgaatgaattttaacttaattttggtattgaaatcattaatcctacctcgctcagtttgttagtcgctctgtctaagacctagaaggccagagttcgactcccccaccactgcgcctgaattattttcttttgcactgacatgaatatcgtatgggcaacaattcaaccgttttttcttagaaaatctggtgacacatttatagcaaatctgtttaataattttctctttttcttttattagcatgcaaatttactaatggtctattcatgtcagcgaaattgcgtgtgttgtgaagtgaccaattttttggcactcccaccatttggttcaaaccaaaattagctgtgcgccaactcccaccgtgaatccattatttccaccgacagccttgtccatgttagaataatcaaattattgtgacgggtggtgtatatatctacatcaaggaaattaattttctgaccttgagatatataagtgtgtcatggaaaattgaatttccccgataagagagtttgtgcacgttagtaaaaccaatgaccgtcagagctagtccggtttttggtagtgtctagttcgaacagtgatcagtgtgaagctaagacatgcattactccctcgatgccatgataaatgataacacattacaagcttgttgctatgatatatcccaattaaactagcttgtgggaaaccaaaaaacataaatctgctaatggtgcattttattagagcgcgcacgataggtgatgtgctgtgttgacttgataattaatcaagctgctggaattctcgcttgctggcttgcactggtagttgggaaaataggtccctagaatccgttgtaattgtgatcctacaacctagagaatgtgaataaggtttttgaaaaagcacggtgcgacattcgtccatcacggctcatcttcctctatgttgaatagctaaatgggtgaatatgttaaacatgcaatattaattattaaatatattagattttggagggatgcaacactttccagtactatgattctggataggcttatctctatattcatagattaggaaatatgacatccctctaaaatcccttaattatgggaaggagggagtacattattgtgttggaattaatagatgggctaaggcccattcgaagattaattctttgaaaaatcacaaaagcccacctcatcggatggcatgcatgtggagtttagtaccaccttgcttattctaggagagggggatctccttaaaagggaggataccctcctagccacttgaagcatgtgtggtggagagaagaagggaaatacacacgcgctcgctggcctggcaggcggcgcgcgtgcacgacatacgtgttgaattgtccacaaaattggcatcctcacccttgcgcagatgcagcctccttttgcagttttgttttgctgcgggaaattcggattccgaaaaatccggtgcgtgaaaacggcgtggagtccggataagttacgcgtgacttatccggttcggttacgcgggcgccctgatccgccttcacgcaacacacgcgaaatcaatctagggtttgcctcttactctgtactgcgccgtcgctcatagactactccatcccgctcgccggcgtgcaccggcgatcgggagagtaggtctccggaacctctgccttcgacgtcctgcaccgggagaaggcggtaataaggtttttgggaaacgcttcacgcgactgctccctgttcgtccgcgacggctcgccttcctctccgctcgtgtgctgcgcaccttcatcgacgcccgcaaccgtgagtagttcctgccgagcaaccggtctttccgccacctcggtacgtgttcgacatattgtgcatatttgatctgttcatgttttactgcttagtttacatgtgtagatctaatgatgcgttcaatctagtttacatctgcaatgtcatgatttatttatggaataaattaaatcattatgtgcttataatttcaacaatccaaaaaccttattataggcgctgtgattttactatggctggttttgccgatgcactgaggccagataaattctccggtgtgcactttaagagatggcaaatcagggtcactctgtggctgacagctatgaaatgcttctgggtgagtactggcaaacctgaaggaattcttattgctgatcagcagaagcaattcgaggaagccactactctctttgtgggatgcattcttagcgttcttggcgatcgtctggtcgaggtgtatatgcatatgaccgacgctaaggagttgtgggatgcactgaatactaaattcggtgctactgatgctagcaatgatctgtatatcatggagcagtttcatgactacaagatgactgacaaccgttctatagtcgaacaggctcatgagatacaaaccatggctaaggaactcgaactccttaagtgtgtcttacccgataaatttgtggctgggtgcattattgcgaaactacctccatcttggagaagtttcggtactgcactcaaacacaagagataggaatactccgttgaggggttgatagcgtctcttaatgttgaggggaaagctcgggaaaaagatgctgcgtctaagggtgatagtgggcagtccagtgccaatgttgtgcataaggctcagaacaagagcaaggggaaatacaaagctcaacagaccaccaactttaagaagaagaagaagaacaacaacaatcctaatcaggatgagaggacttgctttatgtgtggccaacctggtcatctggctaggaagtgtccacaacgcaaggggatgaaggcacctgcagggcagacttctaagtctgctaatgtgaccattggcaacactggagatggaggcgggtatagtaatttacctactgtttttttagttaatcagtctactaattggtgggttgatactagggccaatgtacatgtttgtgctgacatcttattgttttcttcttatcaggtcgcacggggttccatcgtcctaatggggaatgggtcacatgcttcttttcatggtgttggcacggtagatctgaagtttacttcgggaaagatcgtgcagctgaagaacgtgcagcatgtcccttctatcgataggaatcttgttagtggctcccgtcagactagagacgaatttaagttggtttttgagtgtaataaagtagtcgtgtctaaacatggatattttattggtaaaggttatgagtgcggaggactgttccgcttttccctttctgatttctgcaataagtctgtgaaccatatttgtggcagtgtggatgatgaggctaatgtttggcactcatgtttatgtcatattaattttgacttgatgtctcggctttccagcatgtgtttaattcctaagttcttcactgtcaaaggttctaagtgccatagttgtgtgcaatcgaagcaacctcgcaagcctcacaaggctgtcgaggagagaaacttggcaccactagaactcctacattcagatctttgtgaaatgaatggggtgttgacgaagtgtggaaaatgatatttcatgacgttgattgatgatgctactatattttgctatgtgtacttgttgaaaacgaaagacgaggctctagactatttgaaaatttataaggcagaagttgaaaatcaacttgacaaaaagataaaaaggcttaggtttgatcgtggtggagagtttttctcaaacgagtttgacttattctgtgaggaacatgacatcatacataagaggacgcctccctattctcccgagtctaatgggattgctgaaaggaataaccgcacactgactgacttggtgaatgacatgttggacaccacgggactacctaaggcatggtgggggaggcattgttgacctcgaatcatttgttaaatagagttcctaacagaaataaggacaaaacaccatatgagatatggattgggagaaaaccatcactttcaccaagcacatgagggtgcttggcgaaagtcaatataccaataacgaagaagcgcaaattgggacctaagactgtggactgtgtctttctgggatatgctcattacagcattacctatagatttttaatagttaaatctgaggtacctgacatgcatgttggtacaattatggagtctcgtgatgctaccttctttgagagctttttcccaatgaaggatacacatagtagttcgagccaaccctctgaagtaattccccgttcaatcacacaaccagaacaaactgaacatacacataaacatgtcattgaggaggatgtcagtgaagctcctcgaaggagtaagagacaaaggacggctaagtcctttggtgatgatttcactgtgtacctcgtggatgacactcctaagtcaatttcagaagcatatgcatctcctgatgcagactactggaaggagactgtccgtagtgaaatggattccattatcgctaacgggacttgggaggtgacaaatcgaccctatgggtgtaaacctgtggggtgcaagtgggtgttcaagaagaagcttaggcctgacggtactattgaaaagtacaaggctcggcttgttgctaagggctataatcagaaagaaggcgaagatttcattgacacttactcacctgttgctagattgaccacagttcatgtgctactttccctagcagccacacatggtcttctcgttcatcaaatggacgttaagacagcttttcttaatggagagctagatgaggagatctatatggatcaacctgatgggtttgtagttgaaggtcaagaaggcaaagtgtgcaaattgttgaagtctttgtatggtctgaaacaagctcctaagcaatggcatgagaaatttgacaaaacattgacatcttcaggctttgcagtcaatgaggcagataaatgtgtgtactatcgctatggtgggggtgagggagttattctgtgcttgtatgttgatgacatactgatatttgggacaaaccttgaggtgataaatgaggttaaatcattattgtctcaaaattttgatatgaaggatttgggagtagctgatgttatcttaaacattaagctaattagaggtgagaatgtgattacattcttgcagtcccattatgtggagaagatcttgaatcgctttggctacattgatagtaagccttctccaacaccttatgatcctactccctccgtcccaaaaaaagacaaaccctggtttccgtgcccaacgtttgaccgttcgtcttatttgaaaaaattatgaaaaaaattaaaaagacaagtcacgcacaaagtattaatcatgttttatcatctaacaacaataaaaatatgaattataaaaaaatttcatataagacggacagttaaagttagacacggaaacccagggtttgcctttttttggacggaaggagtagattgttgtaacaccctgaaaatttctgacaataaaaatcactaaaattttaaactttttagaacttttgcatcatgctagatgttatggttgctattgcttgccaaactattaattttcacgattgaagattaagctaaagctgtacaactaagtagtaattagaataagataattattattaatcctataaatatttgtgcacatgatagcaagccgaataaagtacaagtcaattattaatttctataatgcagactacaaattgaatgttaaatacttgaaccatgttgacaagtgtcaggacatctaagcaaccatgaaataatcgccactacgatgaccctatataaaggagcgttccactggaatatttatattaatatttataatgttcattgagtctctcatggaatagattcactcatataaaatatttggtcatgtaaataaattgagtaaatataccaccacccttataatgtattctatggaaatatattaattctatatcacagccagcaattatttaagttaattatagagtaacccaatataatgcaaattcatttggaaataagtaaatattcaaatacatatttgaattcccaaaaccaaaatatatatattacatctcaattcaaattccaatcccattcacttttgcagattagcccctccctttccttcctttcgcttttcttccttttctctcttttcctagccgccactgttcattgcccgacacctgttcgacataggcccagcccagcagatcaggaacgcatccatcccgttcccaacccttgcagcactgctcccgtgtgccgcgtgcatcgcatcgatctcgctaccacccgacgccgcgccgcgccatgcctccgcacctgcgccactcccgcgctcgcgttgtgccatgtgccgcatccacccctcccatgcaccgcgccgcacccgcgtcgcaccgtttccatgtgccgcaccacgccaaactcgagccacgccaagccgctcttccgccgtgaatcccggcctccaaccgctctcccgtttccctccaagaaacacggagcatcgccatcgtcaccatgccgctctgcgtccatcggttaaaactgcgcatccctaccgcgcccgctggacaaaacaatgcccttcctccagctagcgcctagacctgcagtacataggttatagatgcgatgattaagccacagaaccttaatggagaaggagataaacccttatccgcgtcgtccacctcatattccttatccgattgccattagagctctagctcatccaggccatgtgccggcgatcttatccccatggtttccttacatcctaagctaagcccccaacaaaaatccccattcctctcagctttcttcccgaatacatttcatcgagcaccttgcgatcactctctcaccaccgctagagatcagcattgcgaggctccccggccggagctggaggttggagggagtggaggaagagccgtgctgccgccgtcgccattgagggagctgaggaccgctggacaccgggaaccacgcgtcgaacactttcgggcatcgccgaccgctagccacctctgctttgtctgcaccgcaccacgcgtcgccgcccttcgccgtctctccatcctagcgtaatccctcgaccccatagcatcctctaactctctaatagctagcatcggctccaatttcgccaaatagcacccgtggccgtaccggcctggccgccattgcactgccggcgagctcgccgtggacaagccatccgggagctcccctctccatctagctgatgaaatcgaatccccatacgccgtagacgctcacgccctcaccagtttggtcggaaaccctccctatcgccctagcacctagctgcccgagctcagccatgctgcgccactcgccctcactccgccgcgcgtcgctgacggtggtgggaggtcgccggagcctctccgtactttccgcagccgccgccgtgccggcctcgcgccatcccggctgtgcccagcgcgcatggcacggctgcctctgcccggctggaggttgaagacgacctccattcgagccactgacaggccgggcccactcctatatttcccctagcaaaaattaatccggtggaaaaggaataaacccggggtcccacatgacagtcaatgtagttgtggataggatttcggattaagaacaaatctattaggaacagtaacttttcacaatttctcggattaattcgaaattgaatctttaaactagtataacttattcattttagctccgattcgagtgaaacttgaacctaaatttatctaaattcataagctttccaatggtatgtaactcactgtttagtaaaatatatttataattgttacataattaatatcaaatgattagattatgatcaacttaaaaatatgctaataaataaaattgattattgtacagtaaactaggtgtgaggataattctctttaccatgctttatcactgtaaaacccatgtaaactaattagaagcatatgtggtcatactcctaccataactcgatagatcaactctgatttaatgaaatgtgtatcccatttatattatgatgattagatcctaaacaagccgccatgacaataggaatgattaagagattatccgtttgcaaacacgaatcgaccccaacaactatattttgcttgtgcatatttgattgaatattggtttttctcgcgtattatagaatttgtatatcggttagtcgtgaggcaacgtatgcagcttccaggaggtgaaggttgatcaagattatatcaagaataagaactatcctgagcatgcaagtcatcaccccaccccttgagcatgttgatcccaattgcgaaattgttttgtttacaaataaaattgcatgcaatgatgaatatcctacttgttattatgccatgcctttgattattgcttatctcattattcccttgtacccataattacgtatgagtccatagtcacttgtgacaaatgctgagtaatgctaatttagattcatgcattctcatatttatcaaatgctttatgcttgggcaactaccttggggagggtagttgagatacggcatgtagagacatgagtgccacattgccatggcattgatgagatgatttgtgaaagaaaattaaaactaaacaaatgttttcgactggggcggctggatgatttgggtggtgtccggtaaaggctagtgccatccctggtcagttaaggacagagccatgaagctaagcatgaaacgaccccaatacaaccgtacttctcgaatgggtatagacctagcggagtagatagccgagcggaggcagtacccctgcatagtggtttcacttaggtgtgtggatgaacaagcagtctgttggcggatacccgatacggatggccagatggcggatacccgatacggatggccagagactgacttgtcaagactacaagactacaaggagatacccaaaagaggacagcatagattgggttcaactacaggatgcgatgttagacttgcgtgagttttcttcctcgggagcgccagaactcctctcactgctagaaacttatgacgcctagagtgcatgaggacttaagttcatggagcgggtactgccaatgtgaggttattgaaaggctttgccgtgacgcgtctcatgtgttgggacgaggctcatgtgttgggcagttgcggagtacgggtaaagtgtacatccactgcagtgtgagtaaaacaaatctattcgaatagccgtgctcgcggttattgagcaccgggacatgtattacacttggctagactctaatttcttaatctgattgggatgggatatgcatcatgattttgtactagtggatcaacttctcgagaggcgagaaggggtagaccccagaaaaccatgatggccagtggcgggaagctatccttgggaacacaatggatggtggatagaaccgtcgctgtttaatgaacaatggagttaaaacttgatcagtttatgctaggtcttaggtttgtgaaatgatatttgaaaactcagctttacgcaaagtaaccatagccactccttgtattatcctgtacattactacattttgtgtggtggcttgctgagtacttttgtactcattgttgctctatatatatcttttagcagagtgttgaagagaagcccttgttagtgcgcttgcgtacctaacaagatgatcggagtttaattccattctaggtctcgtttcccagtcgactgcttgtggtatgtcaaccgggcccctgtattattttgtcttccgctgttgtttctctgatagttgttggcctgccaggccctaatgtaagcatttaactcttttagcctgaattcattcatgatatgttgtgattcggctatgtatgtgtgtaccaactactgatccagggattggtactgataaacataggagatttccgatttccaaaatcggaggtcgacaattgttgcttcgcaagaacaagagaattgctaggaatcaactggaatactcccaaatcattggctcgctgatgtacctagctagtgcaactaggcctgatatctcctttgttgtgagcaagttgagccggtttacctctaatccaggagatgattactggcgtgcgcttgagcgagtaatgcgctatctgaaagatactatggaattggggcttcactattctaggtatcctgcggtactggagggatatagtgattctaagtggatctctgatgtggatgagataaaagccactagtggatatgtcttcacactgggtggtggtgctgtttcgtggaggtcttgcaaacagaccattttgacgaggtcaaccatggaagcagagctgacggtactggatactgctactgttgaggcagaatgactgcgtgatctattaatggatcttcctattgttgaaaaaccggtgccggctgtccttatgaactatgacaatcaaacggtaattgtcaaagtgaatagttctaaggataataagaaatcgtctagacatgtgaaaagacgattgaagtctgtcaggaaattgagaaactccggagttataacgttggattacatccaaacagctagaaacctggcagatcccttcacgaagggactatcacgaaatgtgatagacaatgcatcgtaggagataggtttgagacccatgtgagttatactatggtggtaacccagtctatgtgatcggagatcccgtgaattagaacctgggaagaacaaaccattagtaaactagaggagagtaccaatctataccctctctaagtgaagatgcatgtactctcgtgagctgcaaggcaggttggctatgccttaatgagttctgttggctttaattagcgaagatgatgtcctgcagagcattcttgaaagaactcacctttgtaagcttgactgttggtcgcagtctatagagattttgggtgaatcttctaggaatcttactaaagatctaggagtatgacttatacgctccacccgaggggtagtctacagacggtctagtaccagataagactctgagtgaaacttgcttgcacaagacttgcaattcaaggcgtagtccattgttcaagttgtgagtaagtgtagcttggagttctaggtggatgtttaaccttaatcggtctccatcgaaccgctggtatataaacagtacattggaaaaggcaaatctcagtgggattttgagatttggtgggggattgttggaattaatagatgggctaaggcccattcgaagattaattcttttgaaaatcacaaaagcccacctcatgggatggcatgcatgtgaagtttagtaccaccttgctttttctatgagagggggacctccttaaaagggaggatgccctcctagccacttgaagcatgtgtggtggagagaagaggggaaacacgcgcgctcgctcacctcgcctggcttggcaaggcaggcggcgcgcgtgcacgacgtacacgtcaaatggtccgcaaaattggctcctcacccttgcgcagatgtagtctccttttgcagttttgttttgctgcaggaaattcggatttgttttgttttgaaacattccgaaaaatccggtgcgtgaaaacggcgtggagtccggataagttacgcgcgacttatccggtttggttacgcgggcgccccgatcaagcgacctatttctatataaaccgagccgccgccttcacgcaacacacgcgaaatcaatctagggtttgcctcctactctgtactgcgccgtcactcgtagactactccatcccgctcgccggcatgcaccggtgatcgggagagcaggtctccggaacctctgccttcgacgtcctgcaccgggagaaggcggcaataaggtttttgggaaatgcttcgcgcgactgctccctgttcgtccgtgacggcttgccttcctctctgctcgtgtgctgcgcgccttcgttgacgtccgcaaccgcgagtagttcctgccgagcaaccggtctttccgccacctcggtacgtgttcgacatgttgcgcatatttgatctgctcatgttttactgcttagtttacatgtgtagatctaatgatgcgttcaatctagtttacatctgcaatgtcatgatttatttatggaataaattaaatcattatgcgcttataatttcaacatattgtagccgcacacgtagcatgcagtcctggattgcttgaatctatcggcatcggctgattgacaactaatcaaacataaccaattgaccttgaccatatcatcaatcgaacctttcactggatatataagcatgcatatacacactataggcatgagattttatatatagagagagagagatagagatctgagttgaccgccgtcgacttaattagcattcaagtttttaggagatattctttttatcttggaagcaatgtacatcgatctgccatgcaagcatgcatggatcatggatgcattatgcatatatgcgtgatgaggaagcattatatgcatctggcatctcaacacttgacttaattatctcttgaggccacaatatatagctaggataaagtagccgatcaagcatgcatgaagcacttgaaaccttgtgtgcttataagtagctagctagctataggggcagctccaacaccttgctactgcagaaaagtgtaaaaaatggctagtggatcggatgcaatgggcactttccttgcgatggcagcgttaaccttccaagtgatgcttcttggtggtgccgtcgtcgccggcggctgcaacgatacacggcggtcgtcggtcccggcgatcttcctgttcggcgacggcgcgctggacgtcggcaacaaccaatacttgccgtcgtccgaggccggagacccgatccgcgccgatcaccccttttacggcatcgacttccccggcggcaatgccaccggcagggtcagcaacggctacaccatggccgacttcattggtaattaaattcatttcctttttctctatatgcatgtggcctagctaactagctatacgtactaactaccagtggtattattcattataatcccttcgttccattttaagcacggtcaggagtttctaatgtttaactttgatcgtctgtcttatttgatttttttatgattaatatttttactattattagatgacaaaacatgaacagtaatctatgtatgacttatgttttttaatttttttttaaaaaactaaataagacagacgattaaagttagacacggaaactcatggttgtaattaaaatggaacggagggagtatcaaattgggaaagtctgttcatctctagatatgacatctcttcagggagcggacccaagggtgtagtgtgcactggcatacccaagaaatttgaaaaaaaaaatttggatcacctactccttagcactatggcctaagtccagtagataatggttctgtttagttctcttcaaacttttaaaaattccgtcacatcaaatatttagacacatgtatggagcattaaatgtgaaaaaaatgtatagtttacatgtaaattgcaagacgaatcttttgagcctaattacgccatgatttgacaatgtggtgctacagtaaatatttgctaatgatggattaattaggcttaataaattcgtctcgcaatttacaggcggaatctctaatttgtttcgttattagtttacgtttaatacttcaaatgtgcgtatgtatacgtcaaaaaaaatttagaggaggaactaaacacagccaatatagcagattaggcacatgccagaacagcatgtcaggcctgttgtaagtgttaagtgttaaacagagttgtactctctctatctcaaaatataagggattttgggtagatgtgtgacaaatcatagtaatatgaatctagacagcttctctgtctatattcacagtattaggatttatcatatctacccaaaatcttttatattttggaacggaagcctggagtagcaacaagtagcagtacatgtgtgagcgcgcgtgctgaactgttgagtgccgacacgggttttggggtagcgccgatgatggccagaaggatgatgtattcacaagcgggagaagctgattaattaattaattaagtattaactattataaatttaagaaataaatttatttgcttttataataacttttatatagatttttttttaaaaacacaccatttaacagtttgaaaaacgtgctatatatgaaaaatgagtaagttagagtttggagttgaagaatagaacagggccttgctcaacaagcacaaagcgcacaattgctatatatcatccacttattcatatttgcaatttcctctcggtcccagtttccctcaaactgaattactgaaaactaaaactattttgtgatttctgttcttaaattaagttgagtgagcaaacatatgtgaacaagagcagtgcctagtgtttatttttagtgatcaccaaagaattcagattctagctatactttgacaaattctttaatttatatctttcattacatagttgcagttatatcttctatctgacaatttttgttaattatgtataagcgtctgaggcttatttgtatttgtatgcataaagacttatatattttcttttaattgacatgtgcgggcacacccaacactagtttttcctgtgtccacaattgcgtctcttcatttttacttatagcctaaaaatcatcaaaaaaatattaacagaatagattcgtgataatcaccaaaataaatattaataaaatagatcggaggtgctcatagtggtaggattcgcatgtgtgttcatagacgtgagtgtgtgcacgttgtgagcgcctgtatttgtactgtgtttcttaaaaataaatagattgttgatatatcattgttcaaattcaatttatatatgtagaaacaaaatagcaaatttgactctgaacagaacataaaaattcactgctaaatttgttgtctctaattatataggctgaatttaaagttatatgtttatgatatatcgtatattgatcaagcttacctattttttttaaaaaaaatgacgttttaaacaacatgcacaaaacgatggggcgttccctcgacacaaacatcatctcctatcaaactataaactaattgtgtcaagagatgcatggtaatatgatattgttttgtgtgtggttggagcaaaggctatggggttagagatgagccctccagcttttctgtcgcttaataatagcctgatcgaagtggatgcgggtttcagcggcatcaactatgcttcagcatatgcggttatttggaaagatttgtaagtagtcaaacattccgtccttcgatccgtgttctactggctcagttctttttccaactttcctaactcaccttcctcgttttccgtgtgcacacttttttcaaattgctaaaggtatgtttttcttaaaaaaaaagttatatatgagagttgttttaaaaattcatatttatctatttttaaaaaataaattagttaatactaattaattatgtaataatatgtgctttattttgcgtgccaaagaggactcctcctcctcctgaacatagcctaagccatatatacattttcttacataaaccaaacattttcttacatatacgaccttttcttacataaacaatacagttgggaaatatttccatggaggtaaaacgagtcgaatctcatgttaatttcataaatatttaccattttactatttatcagtcgcctgattttcccaaacaccatacaggacgacgcagaatcagtatcactgccgagacaagtgcgatacttctccaacaccgtggaggagctgaacggcaccgtgaccgagcacgagctaaccgagcttctctccaagtccctcttcctcatctccgcgggcacctccgacctctaccgcatcgccaacatactcgactcgccgtcgccgtcgccgccgccgcccgacaacgagaccgacatcccgcacctcgtcgcctcctacggcgagctcgtcgtccggccactgcacgccctgggcgcgaggaggttcggcgtcgtcaacgccccgccgatcgggtgcgcgccggcggtgacggagcagccgcacagccacagccccgtcggcggttgcgacgaccggatgaacgccctcgcgagggagttcaacgacggattggggtctctcatggccgggctgagctcctccctccccggcctccgctactctgtcgccgatttctacggcttctccaatgccaccttcatgaacccgtcggctaatggtatttaattacttgacaaaatctgtcagattattcgtgaaccgtcacaatttacttcttgcatttctttttaatgatgatgcattcctaatgttagtttgtcatcgtatgtacacagggtttacgaacactgatgctgcgtgctgcaaagggccctgcaatgagcagttcggagcgccgtgtgggaaccggagggagtactggttctgggacgtggggcacaccacggagaaggccgctaagctggcagcagctgcattttacgacggagaacgccagttcaccacgccgcttaacttcaagcggttgatgggaatacactggagatgatcgagatctcctaatttttcacatatttaatagcaaatttgatgggaatacactgatcagagatgatcgagatcacattttagtttttcttttaaatttgctattaaataattctaccccgtttgatttttattataaataaaaaatcacattaacattgatgtttttaaaataagttgcacgtaagtataagagagggaaatatattcattttataaaaatctaacataatgggtaaagaggggataaaaagaaaaattcagtggtacaactgtacatgagatgatgcaaaatttaaaaatttaaaggtatagaagggattgaggaaaaacttgtgggcacatatggaattttctgaagatcaaaacacggcaaccaactaagcctagcgttggaagaaataaaagtaaaataagttgatttttaaaagttggtattttttttagttgttacaatacatgctacttagctcaaatagagcgctacatgctctgtattagttctactaagtcgtatatttcaagtaagaaattttattccaagaacctagcccattagtagtaattttttccctaaaatacttagctcattaatagcaacaacaacaataataatacttactacctttgtttttaatatatgactatgttaacttttttacatcatgtttgattattcgtcttactaaaaaatttaagtaaatactccctctgttttaggttataagacgttttaactttggtcaaaattaaactgctttaaatttaatcaagtttatagaaaaaaaatagtaacatttttaacccaagacaaatttattatgaaaatatatttaattattgatttgatgaaactaatttagtattataattatgagaggggaggggaagtagaggctgacatctaggatccacccttagtcagctgtcacgtcagacaaaactggagtgaaaaccacttaggaacctagtttgcactggttttgtaagttgggggatgtgttgtatccggttttgcagtttaaggatgattttgtaactcgatgacaagttgagggaccttaggtgtactttttcctttttattttcttgtggacggccgtaagccgctaaataagccctttgtcgctgtgtttcggcccattctgctggaaagaaagttgccgccgtcgagcttcctcctctctctctccgccgtcttcagttcttcgccaccaccggggcggggggatgtcatggaccggccggcggccgccaccgccgggggagccaccaaccagcctggggagggccgcgcttccctcgctcttcttcttcctgcgccggccgcgtatgtagctctccgcctccacctcgtcccccaccatctccgtcggccgtcgcgtcgctctttttccaggcagcgcgcgtgagtgagattccggcaggcagcagccacgcacttgtcgaggaccctctccgcggccggcgcttctctccggaccgtacgtgaccactctccctggcaagcagctcgaggagatcgatgatgcatcatcagtatttctgcaaacaccctcggttgctggtggtaggttgaagcatcttgcgatttgtttttcttgtgtgctcaagtgtgattcatggacagctaagccgacgtgttacgttttattaaaatctagggatttcaagctttgttcatcagattgtctgcacaaattatcgagctcttgttgacatagttgccttatgtgcccattctgctcttgaattcttgtaaagaggctgctacttccacctcaattttctgtactctatattaatttgccatctgaaaaggagagatcagccatcgccaagggaaaagatcaagccttcaagatcaccagggcccctccaaggacgccccatgatcgcctctccgtgaaaattgcacatttctgtttaccatcgacgtacactacgtctccatttaataattttctctccatcttttattagcatgcaaatttactgatggtccattcatgtcagcgaaattgcgtgtgttgtgaagcgaccaattttttttggcactcccaccatttggttcaaacgaccgaaattagctgcaactgccaccgtgaatccattatttccaccgacagccttgtccatgtcagaataatcaaatataattattgtgacgagtggtgtatccacatcaaggaaattaattttctgaccttgagataagtgcgtcatggaaaattgaatttccccgtgcacgttagtaaaatcaatgacgaccgtcagagctagtccggtttttggtagtttagctcgaaaagtgatcagtgaagacatatgcattactccctcgatgctatgataaatgatactccctctgtcctataatataagggattttaggtggatgtgacgcatcctagtacaatgaatctatatagacagagacagaatgtgtcatatccacctaaaatctcttatattatgggacggagggagtaacacattacaaccctgttgctatgatatatcccaattaaactagcttgttggaaaccaaaaaaacataaatctgctaatggtgcattttattatagcgtgcacaatagctgatgtgctgtgttaacttgatcatcaggctgctggaattcttgcttgctggcttgcacaggtagttgggaaaataggtccctagaatccattgtaattgtgatcctacaacctagagaatgtgagggtttttgaaaaagtacggtgcgacattcgtccatcacggctcgtctttctctgtgttccgatgctacttgtcatcgtccagataatattgcatctcgtgtgtcatgaacgcaattaagctaacctatccagcacaaaagaacatcatcgacttagcttgatcaccgactgcaggcaacaaccacaggttcttttgtgctgaataactgaatgggtgaatatgttaaacatgcaatattatgatatatgccaatatgccatcgtatggccatacatccagtgatcgcacgtgtaacaatcttacagctacacaatattcactgccacagaaacgattttcctggacagggaccttcagattgcgtgcagacggtaactcgtcgcatctgggaaaatcggctcattttcgcgtgcggtccatttaagaggaccgcacgcgaaaatgagccgattttcccatgcggacctattaagagagccgcatgcgaaaatactcgctccatcttttcccttctacccactttaaaatttcccccactttctctcctctcccctcccctctctctttttctccgccactcctctcccctagtccttagtcctatcctatccttaatttcccttaggtttttctccgccactcctcactcctctctcctcactcctttctcctctcctcggcggcagcccatggcgacggcggcgggcggcgtggaggccgagagaagcggcgccgacgagaggctggtgggaggcggccgccgccgctgccgaggcgggtgtggaggtcggcggcgaaagcgacggcggtgcgcgacggcctcctccacgcggcggtggtggaggcgcgggatccggtgggcggcggccgtccccgcatggatccggcggccggccgcccctcacgtgggatccggctcccctctcctcccattccttccctccccagatccgacggaggggaggggcgtcggcggtgggaggcgtggaggccgggagtggcggcgctgacaggaggctggcgggaggtgggcgccgacaacgacgaggcgggcgccgccgccgacgaggaggaggcagcggccgggagcaacggcgccgctgccgattctagggttttttttgaaattttttttccgatttttattttaccgtgtgggcgatataagcacccacacgtgaaaatcgcgattcacgcagacccttggttgcatgcgggccgaccacccgcatgcgaaaatcagattcgaccgcatagaaaaatcgttctcctattagtgattgtagccgcacaggtagcatgcagtcctggattgcttgaatcgatcggcatcggctggttgataactaatcaaacatataaccaattgatcttgaccatatcatcaatcgatcctttcattggcagacatacacactataggcatgagattttgtatatagagagagagagggatcggatagagatctgagctgaccgccgtcgacttaattagcattcaagtttttaggagatattctttttatcttggaagcaatgtacatcgatcagccatgcaagcatggatcatggatgcattatgcatatatatatgcgtgatgaggaatcattatatgcatctggcgtcgatcaacacttgacttaattatctcttgagaccacaatagataggataaactagccggatcaacacgaatacttgatccatgaagcacttgaaaccttgtgcttataagtagctagctagctataggggcaggcagctccaacacttcgctactgcagaaattataaacaattgctagttgggcagtggatcggatgaaatgggcactttccttgcgatggcagcgttaaccttccaagtgatgcttcttggtggtgccgtcgtcgccggcggctgcaacgatacacggcggtcgtcggtcccggcgatcttcctgttcggcgacggcgcgctggacgtcggcaacaaccaatacttgccgtcgtccgaggccggagacccgatccgcgccgatcaccccttttacggcatcgacttccccggtggcaatgccaccggcagggtcagcaacggctacaccatggccgatttcattggtaattaagggctggtttgttttgtagcctaaattagatttaccaatttttttaaagctaaagtttggtaaattttagtatggttaattttgttaaggtaaagttgtgtttgcattgaagccaaaatagcctaagttaactattgaaatgccctattttctttggcatgccaaaattttgctccaaaccaaatagacactaaacactattgaaattaccaaatattggtaaaatcaaaccagccctaaattcacttattttcactatatgcatgtggcctagctagctatatgtactaactactcgaggtattcactcctacagaaatggttttttttttctggatgagacatacgttgcagacggtaatttcgcatctacaaaaatcaacctctattttccgtatagggctccttaggaggaccatataaaaaatcgatttttataggcggacctcttaagggtccgcacgtaaaaataagcctatttttgcaggcagacctcttaaggggctgcatgcgaaaatatatttttgtagacgggcttcttaaggatctgtctaaagtctgagttacatcctcatttccctctcgacacttcaaaatttttcatccttatccactcctctctctcaccttctctcctcattatttcctctccactctctcacctcatctcctctctcacctcactggacgagacaggcggtgagcggcacgaggcaggcagcaggcggagggagcgatcggcgatagtgggcggctcggtggctggcggatccacctccaccgagcctgcgatggcctgatccgccaccgtagggtccgcgatagcctgatccgccgctgtagggccctcaacggccggatccgcgggcggcgagcagatccgccttcgtcggcctcgcgacaggcatcgggcggcgggcgtgcgccgatagcgagtggcgggcggcagcgacagatcacgcagcgggcagatgagccccgctcaaatttggcagcgggggccacccagatctggcggtggctagggttattttttgcaattttttttaatttttgttttttgcgtggaaaccatataagtacccgcacgcaaaaatccgattttgcccgcacgcgtggaaaaatagtgaattatgcagacccttcaaagcagatgggccagagttccgtacgcgaaaatcacttttgggctgtatggaaaaaattgttgttgtactagtgattattcattgtatcaaattaggaaagtccattcatctttcgagatgacgtttcttcaggaggtgtgccaggtgtgcactggcgtacccaagaaatttgaaaaaaaaataggatcagctagctactccctagcactatggcctaagtccactatttcctctaacccataaaaaactaacctagtaccgaatgtgacacattctagctagcagtatatgaatctggatatacatgtctttagattcgtagtatctctagattcgtagtactccctccttccaaaagtctaagacttattttattttttaatttttccaaaaagccattttagtcctatttgtaatcattatgtgctaaattaaattattgataggtaccaagaagccattttaggtggtgtttggttgaggtcaggaaatgcaaacgtaaatgggatcagctacagcagtaagggaagaaaatgtatcactttacaggttttgtttggttggccgctgtaacgtctcatgtttgcattacattgtttggatggaacatggtaacgggtaacggctgcttccgaagcagggagcgcttagaacgtgacgtagctcaaagctaaggcacattacaagctacatagcagcagtgttctcaaacacgtgtagcacatcaaagctatgtaaaaatattcacaattttataacatgcaactgtttgatactatcacacattgggaagtgtatacagtcttgaaaatgtgaacatcagtttaataatctcaagtagaaattatggatagtggtagcactctagctagggcatgtacaggaataattcaagaaaaggtcatgtggctttagaattcaagtgatataattggacaacatgcatctagaaactactgaaagtgaataatcgggcaggtcctcgcttcattctaaaaagggcattgactccaaagttaagaagcacacatgcatgtaaatatgttctcatgctcaaacaaagatgcaaggaatccaatttataatgttacttctacattaaaagaaataaaagatgccactgtgagtttaaaggagagcacgaaacccaaaaatatgtgttccacttatgcaattggtaacaagtggaatagtttctatggtttccaatcatacacttttcatgaaatataagttagctcacctgcaaatttaccctccatttgcttctgcaaagtgaattttaaaagaaaatggaaagcagggccatctgaagtcaacttcctggacaagagaaaattaaatgctaatcagaaagtagagcaaatatttgttgaacaatgtcaacagcagctgcaaaaaaaatatttgctaacaaagtttttggaatataacaagtaaagaaataaattgcccatgggacagttatgcacataccagatatataggcagttaaccaacaagtaaatagctgcaccgcgagactaattttcgcagcagtcatgagataagcaataattggcacttgaatccttgtggaaggatcacgatgagagcagtggaactccaacagttcaatctcgatccaacgatctcaagctagggtggtgtttggttcggaatactcaagagtaaatatcggatccattttgacatgcaaatatttgaaagcagctagtttcttgaatttgtatctaatatcagcctagcatcatcctggaagatctctgaacaagatcttgtagatgtagcttccgaatactcaagagtaaatataagacccatgctgggagtgagaacttcagaagttcaatgaactaaacaacaagaggatacattgtgatctgtctaaataaagtactgaggaaatatatggatgaacaattgacatgagtgaaactactagattagtagactcagattcagcgagtagattggtttggaacagtccatgctgcgaaacataagtaaattgattatatatgtgcaagatgacaattctgtcgaaaaggcaatgcacgacaaacctttttttttccaatctcacactctgcaaaataatatatcacctggcagtaatgaaaatcaaaattctcaaaatctagagagtaaaatgagttggtccgacaaaatttcggaacttacctacactcgaaaacaaatatgaaagaaccatcaactactattccagatttttcctgcaatcgggaaaaacagattctacaaaactcatgtaaacttataaagcaaacagaactgaggcaggaatacatgcaaccaatcaagaatacaaatgattcactagtataaactacttcatgatttgttaatgaaaagaaaaagatcatcaatcatcagcatcacaagtatatcatcataaagagtggtggtatcagtgaggggagggttctcaccggcgacggcggaaacgacagaagaacctccttggtggctggtgccttcttcgtgtgcctcaagatctctgccatgccttcttgatgctcaacagcctcgtccttctcgcagatccagtcgtcagggatgtggaactcgagggagatggaggagggactgaaggtagcagagcagtgggttgtcggccttgtcgaggcgggcaatctccgggcggtcatggagcgtgcgaggggaggggcagcggcgtcggggcagggggcagcggtgtcgacgacgcacgccgggcagggggagcggcgccagcgacggtgcgctgcaaggtggcggcgctcaaggctaggtcacgttcgctccgctccgcctccgtatcggtaacgcgtaacgcccgatctggagcgtaatcaactttgtattgggctgggattcgtttgcgggctaaccgattacggtccatctaaaacaaacagatgtaagggaatcaattcacgctggtatctgatacgggccgaaaacagcccaaccaaacagctccttagtgtttatcggttacatgctcattggttttgtctcgggtgaatgaattaattgtttttggtcttggtgcaaaaagaaatgacttagacttttgtaaggagagagtaccatagtatgtcacatccggtattagattcgttttttataatatgtcacatccggtattagattcgtttttttatgacggagggagtatataatagcatattaggcacatgtcagaacagcaggtcagacctggttgtaagcgttaaacaaagttgcactttctccatcctaaaatatataagcggctgggtttagggagtatataatagcttattaggcacatgccagaacagcaggtcagacctggttgtaagcgttaaacaaagttgtactttctccatcctaaaatatataagcggctgtccagatttataatgctaggatttgccacatctctcttcaaattaccttatattttaaggattaaagccaggagtagcaacaagtaatagtgcctgtgcgagcgcgcgtggtgaactgctgagtgccgacagagttttaggggtagcgccggtgacgaccagaaggatgatgtattgccaagcgggagaagctgtgcaactgtctttactcaacaagcagaagcgcacaattgctatatatcctccacttattcatatttgcactttcatctcttagtcccagtttccctcaaactaaattactgaaaactgaaactattttgtgatttctgttcttaaattaagttgagtgggcaaaggtatgtgaacaagagcagtgcctagtgtttatttttagtgagcaccaaagaattcagattctagctatattttgacaaattctttaatttatatctttcattacataaatagttgcagttatatcttctatctgacaatttttgttatgtactccgtataagcgtctgaggcttatttgtgtttgtatgcataaagacatatattttcttttaattggcatatgtgggtacacccaacacttgttttttttctgtgtccgccatctgcatctcttcatttttaagtattgctttaaaaatcatcaaaaaaaatattaacagaatagattcatgaaaatcatcaaaagaaatattaacaaaatatatcggaggtacttataagggtagggtttgtgtgtgtatttatagaggtgagcgcgcacgttgtgatatatatcaaataaatcggtgatatatatcactattgtgatatatatcgcatgcgtttgtaccgtgttttaaaaaaataaatcggtgatatatatcactattcaaattcaatttatatatgtagaaaaaaataaatttgactctaaatagaacatacagttcactgctaaatttgttgttttctctaattatatatgctgaattatatgtttataaagtgatacattcccatattaatctatcttgtcaatttttttaagaaaaatatgacgttttaaacaacaggcacaaaacgacggatgttccctcgacacaaatatcatctcgtatcaaactatcagttaattgtgtcaagacatgcatggtaatatgatttttttttgtgtggttgcagcaaaggctatggggttggagatgagccctccagcttttctgtcgcttaataatagcctgatcgaagtagatgcgggtttcagcggcatcaactatgcttcagcatatgcggttatttggacaagatttgtaagtagtcaaacattccgtccttcgatccgtgctctaccgagccataaatatgtatgtaccttttctacataaaccaaaccatctgttgggagttatacacagaaatacaatatagttgggaagagtctcgttccggtgctttatacttgtagtaaaattaatctgaaccgttgatcgtatttaatcgtagtgttgagatatagttatactcccaccagatttaatgagagtagaaatgtggaggggtatatttgtccagagataataattcgcgtagggtattatgtaatttgtcattatctaactgttcaccctctccctatcctatcctaatcgacgccattcccctccatccctctcctccgtcgtccgttcccctccatccctgcctccgtcgccgtccatctccctcaccgcctctatcgccgatccttctccctcgccgtctccgtcccctccagcaccgccgcctcccttggcctcgccgccttctccgccctctccgtcgccgtcctatcctccgccagtgtcgccttctctgcccccctccgtcgccgtccgcctcccccgccctcgccgccttctccgctccctccgtcgctgtccgtctcccccgccctcaccgcctttcccgccccctacgtcgccgtccgtcggccccaccctctccacctccgacgccgttggcgtctcctcccccttcgatgcccttgcctcccccgccgtcttcctaccctaccctcgccgcctccttcgacgccattaatcgcctccatcgcccgaccatctccctcgccgcgtccatcgcctccagcgccctcacggccctctgccccatccgcctcctccgcctccagcgacctcgggtgtggctgtggcgattcgccggtggtatgcggctgtggcggagcagctatggagctgctcctcgtattttcgttgacgaccaatggtggccctccctgaagttttcatctcccgtgtgagcccctctaaaagcctactctttctcccgattattgcagaaaatggctgctcgttcttcaaaccattgtattgttttttgattattttggttgaattgttaggagcagggtcagtatgcaagacggtggcgtgcgtgaaggggatctgcatgccggcaaaggggttctcggtgtataggtgcgacgtagaagcagatgcacgtgagtgacgcggacagcttactgccatgagtcatcccgaagcgtaaggttttatatactgctccttctcattactattacgaccatgaatagaatgatcgttgttatttggctatcggatttgttgtggctttccatttcatgagccttatgtgtgtgcttcactgtctgtgaccccaacgtagcaaaatctgaactatgaaaattaactcaaaatgcaacaacgtttgggaccaatgaaatactcaaggagtatctaaaatctgtaataagtggaagagagcatagtaaggtaattatatcgtggtttgtagtagtggacagtctttaatcttgttcggttcggacttgatcaaaattcctgctaagtcctgtcgaaatattttcatatccttctgcataatgtaaaggtccaattccctacatgcccctgtaatttcacccaatcccttctacgcccctgaaatttgtttgatctcttatatacccctgaatttttatttggatcccttacgtacccattccattagttgaccattagtttgaccgttagttattgtagaaattactttattgtcattggtatattgttaaaagctagaaacgttttgtgtaaattatttgagttgtgaaaaccaataaggaataatttactaaatatttgttatgaatttttaaaaataaaacattatttcattaaaataaaaaagatttattgtaaaaaaagttctgcataaaatttgaaaattacttttcaacaaatatttagtgaaaaaagattcgttgtgaaaaaataaaggggatgtaattagtttgtcacaaattagaaaacaaatttaaaatttttaaataaatttcagatcaaatttgatgaatttcgtatatcttcccaaaaatttaaacctaaataaaatttagtttttgctcttaattttctggtgaaactaatgtatggatttaatcatattttttaaaaaataaaaaataataagttttattttttaagttgggcattaaatgattatattgcttgtattttgtataagttaatttttttcatatgaaaatttattgagtaggtaccacatatgtataggatgggtaatatagtcgttgtaaaatatttaacggtcaactaatggtcaactaatggagatgggtatagagaagattaaaatgaaaactcatgggtatataaggaatgaggtcaaattcaggggtattgaagggattgagtaaattttcaggagtatataggaattttctctaatgtaaagggagtgcattttaaatggttttcataatgggaagcattggtgcaaaatatgaatagagtttattgtagttgcctgtatttgattttctgggagataagatccactccaatgctccatgaacttaagggtgtataggccacacgagacgctacaagaattgagtcattaggttaacaagttaccataattgaaaaatgtgaatatcatgtggaagagtttacgggtcacccacttgtctccttgctttagcaattttttgactttgttgtattcccatttggtaataacaaaatcaagccaatcatgttttaactgtgggtgttcattctttgtcccgtgtaatcctctctcgatagctagcaggtaggaagttttgtgcaacatcagtatggttaaaacatggcaaaaccaatttgaattgtgcaagtggaagtgtatcacttaccacacgccctagttcgggtcgatgttcattgattggcttggcaagcgaatctagtatttgcacctcacgtcgcttggcattaagaatggctaggtaccagtgtgtttctgtaatattagttgggaggaaaatctgcagatgttcaacagtaagatacattcataaattgtaatagccattacatacatagcttaaataagtattaccatgtcaaatggtagttagtcgcatgccatatctctaatccatcgtttatcacgagggttgttagattcaacatgcgctccctctacattgagtagacctgtttttatggcctgctctaggaaggccttgcgatctcccctgattcctttctctttatctcggagacattggatgtatgcatccatgacctgaatttgaggttagttcagttacattaaaaatatagttataaaaggaaagtaggtttgttaaataggcgaacttacatcatcattcaagtattctggttcaattagtactttcattgatttccgattaaccttcacttcttcaatatgcaccatcactttgttatcctttgtcttattaatgtaggtaatgaaagggtcttcttttttagtcaactcttcaaatgtcgtacaaatttttaatatgtaaacatagaatctatataatagatttatagaaaagtacaatgtttagatattacctttagaattttttatcggtgtctggctgttcgtttttcttttcttttgacctcgtaaggcgttctttggtgggcttttgtgtttttttgataagatcctccttatcgatgtacactacaaaagggtaagtcaaatcagtaatacacaaacatagaaaagaagtaataaaatttaggatgatgtagagagttcatacattcagatattttcttcagtgtttggttgctttgttttctcttcttttcaccctgtaattcgtctgtgtctggcatgatagcttctttttccgttcgcgcttgaaaatgaggaaaattagtaccaatcatgagcatatgtaaggatgaaatagcatagtacctggtgttatttttgttggtgtttgggttctgattatgtcctttttaccccttgattcgtagatgaagtcagtccgatttgttggtttgtatattcttcctgtaggacctataagcctcttgctgctttgattgcactcgttactgtcctcctgttaggtcatgttcacgttagtattatgataagttgtagtaacattagcgagagaattttaatttgccttaccttcgtttcacaagtcgtgtcaacgtttggatttatataggcctcttcgtgatgatttgatacaggctctctgagatcactttgttcttgttcaacatcttgccatagtcaacttttttttatttatccaaaataaaccgttccgctatattttatgagcgattgaccggaaaaccatggttttttaaaatcgacccggtccggacggtcccggattccatatatggattttttttttctgaaattaacataaaaaagaaaaaaatgcatcactccttgtcggcttgcggctgataggagcacatgcggcggtggtcgcgtagcaccctaggtttgcggcagataggggcgtatgcggccgagctctcgtacctcccacggatctcggcaaataggagcggatgcggccgcggtcccatacctcccgtggatctcggtgaataggagtggatgcggcggccgtcccctaccaccagcggctttcggcgctcgcctgccatgggcggcttgcggggagttcattagcgacacctgaatcgtggggaggtttgacagataaaaaggatggaccaggtacccctatttgttttttattcatcaataatcccctttctttctccacgaatctcatcttcctatttcttgaaggtcggtgctaggaagatgagatttgtggagaaagaaataggagtattgatgaatgaaaatcagatcggggcacctggtccatcctttttatctgtcaaacctccgcacgatttaggcattgctaatgaactccccgcaagccgcccgtggcaggcaagcgccgcaagccgctggtggtaagggatggccgccgcatctgctcctattcaccgagatccgcaggaggtatgggaccgcggctacatccgctcctattcaccgagatccgcaggaggtacgagacatcggccgcatccgcccctatccgccgcaaacctagggtgctacgtgaccgccgccgcatccactcctatcagcctcaacccgaccaggagcgatgcatttttctcttttttatgttaatttcaggaaaaaaaaatctatatatggaatctgggaccgtccggagcgggtcgattttaaaaaaccatggtttttcggtcaatcgcttatagaatatagcggaacggtttattttagaaaaataaaaaaaagttgactattgtaggatgtggaacaagaacaaagtgatcccagagagcctgtatcaaatcatcacgaagaggcctatataaatccaaacattaacacgacttgtgaaacggaggtaaagtgaattaaaattctctcgctaacgttactacaacttatcataatactaacgtgaacatgacctaacataaggacagtaacgagtgcaatcaaagcaacaagaggcttataggttctacatgaagaacatacaaaccaacaaatcagactaacttcatctacgaatcaaggggtaaaaagaaggacaaaatcagaacccaaacaccaacaaaaataacacagtactatgctatttcatccttacatatgctcatgtgaatggtactaattttcctccttttcaagcgcgaatggaaaaagaagctatcatgccagacagactaattacagggtgaaaagaagaggaaacaaaacaaccaaacaccaaagaaaatatctgaatgtgtgaactctctacatcatcctaaattttattacttctattttatgtttgtgtgttactgatttgacttacccttttgtagtatacatcgataaggatgatcttactaaaaaaaatacacaaaagcccaccaaagaacgccttacgtggtcaaaagaaaagaaagcgaataggcagacaccgataaaaaattctaaaggtaataaacattgtacttttgtatagatctattatagattgtatgtttccatattaataatttgtacgacctttgaagagttgactaaaaaagaagaccatttcattacctacattaataaaacaaaggataacaaagtgatggtgcatattgaaggagtgaaggttaatcggaaatcaatgaaagtactaacagaaccagaatacttgaatgacgatataagttcgcctatttaacaaacctactttccttttataactatatttgtaatgtaactgaactaacctcaaattcatatgatggatgcatacatcagttgcctccgtgataaagagaaaggaatcaggggagatgacaaggccttcctagagtaggcagggctagtcctgacttttcagagccccggtgtgaaactagatataaaggcccttatcatacgatataataataatcaatagatatatatattgaattatggtcataaatatttaaattgcattcatcaataatatttatataggaaacattgaacatttacctcgaaaatttcttctgacatttctagctgcgaagtcattgataatggtaccaatatcaatttcatccaataatttcttctcaatgcataaagttatcaaaccatttaaccttttcttttttataatgtacatgtgtgcagcacaatagtgcagtcagggccttcgtcgattcgtccaactctaggagcaacatcaattgaattaattaaataatcgattttgctatatctcactcgaaagattttttcttatctctcactcgattttctcacttaaatttacagtacattttcttttcttgtaagttataatgtaatttatgaaacttacattgtaacttttgtaagttacagtgtaatttttgaatcttcgcatgtaagttttgaaatttgtattggatttggtctttttcttaaagatatggtaatttagtgtctactatggtgtttcttagttgctttttgccttttactgtgtctattggattttaatctaaagattaaaaatctgtctgatacgatcgtaaaaatcttttaaaagatgcataggtactcccttaaataattaacctaacattcaatcctagggaacaactgcaactgaatcaatttttcacatgtacttatggcaattgggaatttgagatttaggaaattgactcactcacctgaacacaaaacataccactccgagtcctgattcctgaatttactgatcgttctcctcggcagtactcgatggcagcaaagcaatctggaaagcggcaagctgcactgcaagaagcggcggctgcggctgcggctgcggcctgcgggcttgtgtcggcgggacggcgatggcgcgacatcgcgactcgcgtgaggaggagacgaggagggggttagggttttgggcggcgacgcggcaatgtcgctcctcgatcgcgtcttctgatctgatcttctctctctttatgttggctttctctgcgcgaggccgaggggccgaggctgcgccggcttactgttggattgggccgtaagccggtaaataagcccttttgtccctgtatttcggcccattctgccggaaagcaagtgtgccgccgtcgtcgagcttcctcctttctctctctctacaccgtcttcaccaccaccgcgccgccctccccttcggtctgcgccgccacgccaccaccgtggcggggggatgggatgtcatcggccggccgccaccgccggggggagggccgcgcttccctcgctctccttcttcctgcgccggcctctccgcctccacctctcgttccccacatctccggcggccgtcgcgtcgctttctttccaagcagctcgaggagatgatgcatcatcagtatttctgcaaacaccctcggttgctggtggtaggttgaagcatcttgcgatttgtttttcttgtgtgctcaagtgtgattcatggacagctaagccgacgtgttacgttttattaaaatctagggatttcaagctttgttcatcagattgtctgcacaaattatcgagctcttgttgacatagttgccttatgtgctcttgaattcttgtaaagaggctgctacttccacctcaatttgatattctattccgagattttgatgatcaatgctacgaatttataatcgatttatcaatttttgtagttccaaattgatgtttcaatctgaaattcaatgtctgatgcaatgctcaatacgacaatacccattttttggatcagtaatgcaccttactccactgatctagccgtggatgttcagtaatggggggctattatttcactggtatagttgggttacccaactcccaagcatgctcctactggcttaagaatcttaggcattcgttgaatgaaaattataaatctcaactactatatagatgttcagggacatatatagaacacatccaattgaaggtaggctacatatagaaacttcatagtctgctattgtgtatgcatttgctctcccagcactactctccagccataccttgctgacttcctccaaaactgtaaatgccttgcttctttcagctagaaagactcagctcacagtggatgtattgatcacctttaatttaattagcccatgcgcttaccctgaataaatcaactgcaactagacaagtactattagtcgtacagctaaaaattctatttaggcaagatcaaaaaaaaaatctacgtaggccaagagattgagagtagagctatatgacttagcttttaaaaggtttgaggttgccgacttttaactacgaagcatgagccatgtgataggaattactgaataagcgtcatatctcaatacttgactttgactttcataccatcagtttaattaagaccatggactttgataacatagttgacacttaatttgtgcatataaatagctagctagctaactgcacttttacttcctatcaatcgtcagttcaatcatatatatacattctacatgaatgctgtataaataacatatgcagtagtgttcctgagttttaattggcttgtttggtgatgatgatggggcacttcaggatcatagttctaagccttgtgataatagcatcctttcaagtgcttggctctgctgaaggccataagacggctgtaccggcgatcttcgtgttcggggacggcatgctggacgttggcaacaacaactacttgccgtctgacgccccccaggctgactacccctactatggcatcgacttccctggctctgagcccactggaaggttcagtaatggatacaacatggctgacttcattggtaattaagcgacttgatcgatcatattgcccttattatcttttacagttatgtcaccattaaattgtattttctgtgtcatagtttttcatatagttatttgtgaattagatggatgtttgatggttattatacagtcttttttttttgctttagccgaaagattttttaagtgttttcaagcagttagaataaatcgcccacaatatacccaacacgactacaaataattaatgaattaatgctaattggtagtgtggtcgttgctctatactactattgactttcagaagacattagcaaataaaggtagtaatgttattgtagtttgtaaaaaaaaaatgatgaatataaagaaatactaacgacgattcagcatttcataatgtttggtttgcaaatggtatttctttgttacattgatatatatgattctatatttgagaaaggtagtgcatattatcaagtattcttttatttgagaaaaatacccaagttaatttttggtatatgcatgcaactttaattggtgtgtgctatgcatgcagcaaaggatatgggattcaaaatgagccctccagcttatctatcgcttaacagttcgataaaaatggagaccaatttcaccggagtgaactatgcttcagcaggtgctggcattcagatcatcatggtaactccagaatatatgcttaaatgcaaattcaaccataatattaattgtgaatgctgccatggcaatggcatcaagaaatggtgattatatatccaagttggtcatataaacatatttgaattgttgcatatctatatcactaattatcagaagcatgatctttcatgatggttaattaatgattggaaattgcaaatgaaagaagagagtaacatgtgactagatatcttgtcggcattgtaattttcaaaaaatttctgacagtgacataaggaaaattttatatcaatataatatcatctctgactgtcaacttctgatagttcgctgggccatttcatgggcaatctacaattatacatgtcttcgttcaatttgttcgttactctttgctatcaggaaaattatacccaatattatttagtcggtagatcaagagcttattttgactttgtagtaactcaacattttatataggatattgaaatctatgatgaaaagtagctaccacaaactgatgaatttcttggttatactatatatacgcatgctaagaatatgagtgatcagatctgctagcaagatgaaagatcaaagtgttaataaacatttgatggttatttaacagataaaatactgggttttccctggaaataaccttaattgatgctatattgtgaatatgcagaacgatgaagcaacgattccattcgtgtaccaagtgaagaacttcaatgacacggtaagccagatggaggctaacctaggccaccagaagttgagcaagctgttggccaaatctttattcctgataagcattggtaccatggatctgtctgtaaatatatggagagtattaagatattccagaaagccatcaccattcaacattccatatacactttcctcctacaaggccataatcatgcagttgtatggcctgggtgcaaggaagtttgggatcatcaacatccagcccttagggtgtcagccatggatgaggaagaacttggaaaacaatgtcgactgcaatgactccatgaacagtctcgctagggaattcaacgatggcctcaagcccctcttttccaatctcagctctcagctgagtggtctctcctactccatcgccgacttctacgcattctcaaatgccaccttcatgaaccctcgggcttacggtaagtcaatcgaaattattgaacactttttttgtggttgggatagaggatcatgagatggactgtaacacaaaccatggaaatgctacttgtccttgtttatctaatgtatttattgtggttatatcttgtatgtgcagggtttgtgaacatcaacagcacatgctgtattcccccctgcacacctgaacatgaaccaccctgccaaaaccgcaagcagtactggttttgggatctttcttacacgactgagcgggctgctaagctagccgcctctgcattttacgatggccctgcccggttcactgcgccggttaacttcaagcgattgataaagatgaaatgattttataataaagatcttttcgtgttgcaagtccattgacgagtagttgatcaggttttcctgggtgtgtatgtgtgctttccttaattttcatcatcttttttgtatgcctctggattggtaatttggtatatatatgtatgaattccatgctaaggaatgtgtcacaataagttgatcgataagaagaataaacccaactatatataatcgacgtttttgtttcagtgagaagattttgtttttttttttccctagactcctggtttccacaagtttgttaccaacctcccatcatgtcatgtgtggcattcacactgtgatttgggtggatagaataatttgagacgcactcccggatgaatgaaccaacactgccacaatagtaacagactcttcaaacaaagaaaattaaaaagaagaagaattagatatagaaaagataaaaagaaaaaaaaatcttgcgaagcagttaatcagccaaccttacctacactcttctaaactaagtcagtttgactttttttcttagttgaactttttaagtttgattatgtttatagaaaaatatagtaatattttttaacacaaaaaaatattattaaaatatattgaatgttatatttaatgaaactaattcgatgttataaatgttactatcttttttaataaatttggttaaatctaaaaatattttactagagaaaaagtcaaagcaactaataaaatgaaacggaagtaggaaaatattatagcaaagatgaaataaaaggaaaatctttaatctttatctagctcataataataaataaataaatcattaattaataaattcttcggagtttggactcaccaaatcttgttaacgtgtaagacttactgtacttttaagggattgacaatcaaataggcttttctactactcataatggaacaatttactgatcattcattgcacctagaagctagggagatgcacaaagtcacaattacaaagaaccaagtacttcctccgtttcatattataagactttctatcattacccatattcatacgtatgtctaaattcattaaaatcaatatgaatatggacaatgctagaaagttttataacctgaaacggatgtagcagtaacaatcgccaaataaacaggctgcacgttagtgggggaagatagtagggatgggcgtagtcgcccattgggcttgttggccggcctgtctcataaattaatttgagcaggcccaaactgaaaagaccagctttagtgggaaacttaggccatgcccaacgctccaacgtggagcgtgatctcaccccttccaaggagtatatttgtgccagctcggacaggaccgtatcccggtagagcgccgcgacccctgcagagggccggataatttcgtcagcttttcggtgcttttgggcaagaaacaggagaggaaccgcgttggggagatgcttcacctcaagccgtcgccacgcgccgttgctgctcccgcgcggggaagaagatggagagggggtggactagagagaacggtcgcatcgatcccccccccccccacgccggcgcgtcgagaccggccgccactgcgtcgatgggtcagccgccgccgcttcgatcgctgccggggaggggagaggagaggagaggagagctatagaggcgtgaaatggggagggtgttggtggggactggggagaagagggaggaggagagattttatattaatttctagattttagggtgtttagtataaaatttaaacatctatataaattgaaaaattgtgagaactaaaatgaaaaacaccaaggactgaaataaaaatatgaggctaccacctggagaaactagcacagtaggaaattagctttttgagagtgttgccccatcccacgtggcatttgaggggtaccctgcgttggccatgcccttagggtgtgtttgctactggaggttcccaaccaggaacagtgtgcgtggaaaacggagcggtacattagcacgtgattaattaagtattagctatttttttcaaaaatgaattaatatgattttttaagcaactttcatatagaaacattttagaaaaaacgtaccgtttagcaatttgaaaagcatgcgcgcggcaaacgagaggggaaagtgccgaacacacctgcttcaccgaattattaaaagcatcgatccctgacatcatcacacatgacgctccattttctccatctccacttccacgccggcggggcggtgccgcttcctcccttctcccaacctcttcatgccggcgcgattgtggctcctcccctctactcccttcccccatcctccacgctaatgttggcgcctgccctagaatttttacaatttagtacttttgaaaaacttattttacaaataaactcctggaaaaacttatcccataaatggttcttttcagggcaccagagtagatggcgccaacctcctgccaccgtggtggggcggcgctgaggtggcagggggagcgcgccagagtggctgcccccccccccccccccggccgccatttttacctcttctctcatctctagtgtagaggagagagatgtgcaactttttatttttaaaaaaataaattcacacttaggagcacataagaacaaaccgtaaaaaaaataaactcaaatatttcaaagctataccgaaaagcccccccccccccaaccccctcccccgcgctatccctgctcttcgttgttttggttttcctatagccccccacctctccccccaccaaaaaaagtagattagattttgaatactcttagccttttttaacctcttttacatcctataaaaaaaataagttagggttttttctgctatattcgagtgtcatttcttaaaacaggcgtaactttctcatacggacttagaatcaggcaaataatatatccacggacatctacagaaaaagttacatccaattctccctggctttgctgagttcagcgagattaaaacctccaaattcagctttcaagattgtgttttcaagacgagaagcttttcggtagagctttggaaaattttacaggtcacatatttcgtccatttgagttaaacttttctacggttggttcttgtgggttcctaagtatgaaaaaaatatcaataaaataaaaataaaaaagttgcacatctctctcatctacactagagaggaaaaattctacaagtcacgtatttcgtccatttgagttcattttttctatggttggttctggtatattcctaaccatgaaaaaatatcaaaataataaaagaaaaataaaaaaaatgcgggggccggggggggcagccacattggcacgctccccctgccacctcagcgccgacctgccacggtggtaggaggacggcgccagcgactctggcgctcaaaaaggaccatttttgggataagtattttcaggtatctatttgcgaaatgattttttgaaaggaccaaattgtgaaaaatccagagcgcttgccccctttgacctttgtatactgatgtcagccttcacgccggtagcatatctcctacgtcctccgagctccacccttggcttcagcacgaagatttgacaatgaagaagacagtggggctgatcatggttggtagcaactagctagcccagaactcctgttttattgattttgatcaagaaagcactttttcttcttaattttgatctactgttttcttgattagttgttgtaagttccttgctccatcaggtcttctagacgtgctggtgataaacatgccatatacatattatatatttaaaattatgagtgattttatagttattaagaagatattgggagacatcatatattttctagggaaaagtccattttacaccctcaaactcttatgcttatccaaaatacaccccaaactataaaaccgaatataatacaccctcaaactttcaataccggacgcttaatcccccgggctgtttttacggtggtttttgacacgtcggatgccacatcagcccttgccacgtcagtccacaacataatatgggccaagcccatattcactctctctccctccctgccctgttcgcgttggcggcggcggcgtggacctgcgagggcggcggctgcggcatcggcatggagctgcgagggcgggacgtggagctgcgaagggcggcggttgcggcgtcggcgtggagctatgagggcagaggctgcggcatcggcgtgcagctgcgagggcataggctgtggcgtcggcgtgtggttgtgagggcggggcgtggagctgcgagggcggtggctgcggcgtcagcgtggagctgcgagggcggcggcgctgccatggtcgcggaggcagtcgccagcgaaaggctctgcacgcagtcgccagcgaggagagtggcaacagcggtggaccttgctgccctgcgcggaagaggcggacctcgccggagccacacgcgtggggaggagtcctcctatggaacgccgccactgcttgatcgaggacgaggtcaagctcaaggccatatctgcatccgccggccgccgccgcctcatcgagcttgagttcctgatccccaagccccatcgcctccgccgaactctacgtccccaagcagctctagcaccaccagcgagttggatttcatggagaagatagctgctcctggaggctgcaggagaggtggaccttgagctcgggctcgccggcagtcggcgcggaaggaaaggctagggatgtgtttgagctccgtcgcctcaaagagtctccaccaccgatctcctactccacgagctcaagaatgccactgccatagctctgggaggaagaaggatagagagagaaagggaagaggagatgagggaagaagaagaagaggtggttgcctccgtggctatggactgacatttggtcctattttttttatttccaccctagacttccacgtcaatgccacataggcgaaaaccagctgaaaaaccactcgagggtgtaaagtgaacggtattgaaagttggagggtgtgaaatatccggttttagagtttgggagtgtattttagacaaaacaaagagttggagggtgtaaaatggacttttccctattttctaggggatgtttagattgtagccaaaataaaccttatgaaactttggcaatagcaaaatttaggcattaacaggatttcttatgtatttaccaaagtttggcaaaactaaacgtgaatattttttttttgatagttttgcaaaaaaaaatagtatggttaaaaatgacatcaatttgaacagcccccaatgtaaaattttgtacctctccctccggtactggaaggtaccaaatttgaccttccaaatttgtactaaattttggtacatcttaataattataaaattcctctaacattatataaataaagtgaacatatttgtcgttcaaccacatatcgagagaattatgcatctctatgttgataacaggtgcatctacttgtgtaaatagggagagagcgtgaaaacgacgaggataaacttatggggtcaagatgagcatcttttctgatctgtttatacctgtggattaggatatattaggtaaattacggtagaatgtgactcggttctgttctagttatctagtagtactttaattattgcacacctagattattattactatgctgcggttctttaattatttagtactccctcggtctaaaatgtctaaaatttaatagtttagaatcggataagacatttctgaacatgtagattattcaaatttgtagttttatgaagtgtcttgtctaatcgaagattcttatatttttctgggatggagagattacttatattttgatactcacaaattcgtaagatttgcttgcctgttacagcgatatatcgttgcatatgttgtttcttgcattttgctcatcctagggagggttatttcacaggactgattatgtgcagtgtctgtggatatacaagagaactttttattattttttgcggaaaattgagttggttatccatttcaaattactccctctgtttcagtttcaggttataatacgttttgactttggtcaaaatcaactactttaagtttaactaactctatagaaaaatgtagtaatatttacaacaccagcatacttttattaaatctataattaaataaattttcataatatgttagtcttgagttaaaaatactattatttttttctaaaaaattagtcaaacttaaactagtttgacttttgacttaacgtcttattacctgaaacggaggaagtacttttttttaaaaaaaaattatctacgtagcatcctaacacacataggctcagaccttcgcttctcctgatctctcatcactcccgcttccatcctgctcgtcgtggtcttggtgttcctcctcccagtcgtcgcaaacgtcgaggaagtagagcgcgcagaccatggcggcgcaggcggcgaacatggggatgggcccgaagagccagaggaagaccgggcaggagaagtagaaggcgcgcgcgccgagcgaccagaagtagctgccgcggttgagcgtcgcggtgacgtagtcgacggcgaggcccgggcggcggcggcgctggatcaggcgcaccggcacgttcacgagggtgctggtgtggctgtagtaccggatggactgcacgttcaggaggaacgccaccaggaagcacaccaggatggcgaagaatttcaccgacagcgccgtctcgcccgcggcgcccaccaccagcggcgcgcccgggaggagcccatcgccgccgccgccgccggcggaggacatgaggatggcgatgagggagctgagcgtgatggccgtggacgccagcagcgtcgacgccatgatgttgttccggatcgtctgcaccgccagcaccgcgtgcttccccgacgcctcctgtatccacccgaaccccgtcactccggcgatctcattctcatctcgctcgccaccaaaaccagatcaagtgtacggacgaacctccatgatgtggcggacccagatgcggcggttgatggcgttgacgccgatgacggtggtcgccgggcggcggcggatgcggaggagcagccatgcgtggtaccccaccatgagcgccatccccagcgggatcagcacgtagtccagctcctccttcctcatcgatctccgcacgcgcgtctcacagcgcacgggagatcgatctcacatccggttgcacgcacgcacgaacgaacagcagctgagattgtcgatcgagtcgatcggatcttgcgagaagcgtggatcgaggaagacgaggaaaatactttcggacgctctcagccaatcccactcatattctctctcttctttgccttttgaattgcatatgcatatgcatttaactttttaagcaagatgtagcctttttttttccaaaaatacttgtccaatcactacgggagaaaccatctttgattggttgcccaaaaacaacaatagtcccggttgcttaaaaaacccgggactaaaaagcatttttagtcccggtttaaaagtgcaatgatctaacactaaccgggactaaagataatcttttttggcacgacgtggcaagtcttctaatatttttaatcccggttggtataaacaactgggagtaaagatcagatctttagtcccggttgtttataccaaccgggactacaaatcagtttcccacatctcgctctctctctttcatcatttctccgtgcgcgcgcatcgatctgagtcctcgtcaccctcttatctcttcctcccctccactctttatctctcccttctcttcctcatctcttcctctttccctctcatctcttcctctccccttcctctcttctcttcctcagatctgcaggagaagcggccggtggtggccgggcccgtgacggggagagacggcggcggccgagcctatgctgggcgggggcggccacggcggcggccgggccatgccgggcgagggcggtggcggccggacctgtgccggggaggggcagcggccgggccgtgccgggcaagggcggcggcggctagggccgtgccagggaggggccgcggcggcggccggggccgagccgtgccgggcggcggcggcggcggccaggcgatggcgggctggggaggtttcggccaggcgtggcagggcgacggccgccaggcggtggctgagcgacggcggcccggcgcggaagaccgcgcggcggaaggattcatggatttctttttcttttttccttctcgttgtgtgaataatgtgaataattgtttgctgattttatctgtgatttgagaatgatgtatgatttgttgttgtggatgatttgggatgttgagatattggtttgttgctgtgaatgatttgggatgtgtgaacaaaatctgtgatttattattttatttgatttggagatatttgcggtagaaaaaaaagaaaaaaaataacttttgtatcggttggtaacttagtctcggttggtgttacaaaccggcactaaaaatctatttttagtcccggttatttcaaccgggactaaaatgaacatctttagtcactataggagggttcccaactgagactaaaaagcgattctccaatagtgaatctaaaatccaattacaccgttttattagttacaattaaatctttacaacaacatctcatatgattaaattacgatgatttttttaaattttatgctgcatatggcgttattaagatgtttcagtaagtattgtatgatgtttctgtacttcgtttgcaaatgttgtacatcatgttatttagatgtttcaataagtattttatcatggttcaataattacatcttggtgttttatatgtgataaaaaatgtttcaatagaattaattatttacatattgtataccacatatgtttttttatgatgtttcactcgttacgactcaatgtttcatgcattgattatgggtgttgcagttagtaattttataatgttgcacccctatgaaacatcttattaagtgggctgaaacatttatccaagtgatgaaaaaacatatataattttatcaaaatataatgatgttagatcttgttgtgaagatttaattgcaacaaacacaatagcataatcagattattgatcggataaatattttaggagaaaaatcctgtatgcatgtacatgagtgggaggtacttgctatactctgctaaagagagaataatagacccacactgacatgtatagaggcaggtgtaggtgcatgcataaagtaagacctccataactagcagacatcggatatttgcaaaatatcgaacgtccgatgcgtagcatccttcggaagacgacgatgacgaggcgcgaggagggatgacgtgagggatggaggctggtttgctttggagttcggaccaggccgggccgagtaggatactctagaaaaggaaaaggtccaatttaactccctcagataaaggttagatctgatttgtatccctcaaccctaaaatcgggtatatcaacccctccaactattaaaaccagtacaaagtcttagcagtattggcagatgtttttgttaatgtggcattttgtccacctctcctttctcgcagtggtcgggccgacggtgacaactggtgggaccaaggcagtgcccgacaaaaaaaagagctaaaggcggcagctacttcctcatagacaagagaggcgatggccccacgtgaggaaaatcagccgggggaggcagagaggatggtggcaaggagcttaggtccggcacaagcgtcaccagtctcaccctagccatggcactcccggcccacaccatcctatcatatctccccatggcgctcacttacctccaccacaacatgcccctccttgaagggacctacacgaggtcaaagctcaccagcgtgcctgagggaagagaggcggtggcggtcaacgatccctggagagccacgaggaggatgggatcccctgtggggaggtggaagatgatgacggtggggaggactagcctcttttctttgtcgtctcttgtcactggaggtgagagcggtggcggtctgctcagcaaggtgagtgctcggcggaggagagagagcaacagcagcgcccaacatccagctccacggcccatctcctccatgatgtcatactccgcggccaccggcagcttcgcgccgcaaccctgttgacttccttctcagctcgacaaccttcttccccgatgacaacaccgacatgcagaaaaagttcagcctgcacgctgctccaccccatgccattcataacccaggtgatgatggtggcctcctcagcttcctccgccattgccgccacttggcctccttgtggggagatggcgacaagcaagtctgcactatttttctggattcttgcgcttgtttctgcgaaagaaagatgaaagatagaggagaagaagagtcggttcgaacatgtgggcccataattttttatgttttccttagggacaattgctcatgccactctgtaccgaagcaatttaaccctagtttttcaattttgctcatttgacccccacttttcaagtaggacatcgaagcacaagttgatgaatttttgggtccgttgcaatgctcacccacaaaataaagggtccatcctaatttcataatagtgtccacctgcaaagtccaagtactccacttatatcattgtgtcctaatgatctcaaacctttgtgtacttcacttgtctcaaatctgtgaaagctatgccaaatttagtataaatatgtcaaaaaggtctgaataaacaaaagactttttatataacatggtcaaatgagcgaggaaaaaataacaatttgccccatagctagcacagttatcttgtcttcatggtatagggtcaaccttgatcttcaaacttgaaaaatggggtcaaacaagtaaagttgaaaaagtgagattatagatgggtagttagccttcagaatagggtaaaatgagcaattatcttttttttaatcacttacatgtaggccccacatctatttttagttcatgtgatgacagagctaccatctggacgccacgctagcaaaaaaccatcctcaaaacaattgagtgagtcatttttgcacggtttgaatagctatgttaaatttattataaatatgtcaaaaagatcttagagtaaattgcatccacgatgcatcaacttggcaggtgggtgcaatttcatacaagaacttgagaaatgagcgttctagtggaacaacttggcagataggtgcaatttagttcaagaactttataagtgatcgcataaatgcaacaacttgcaagatatgtacgattttgatacaataagttaagaagttatgcggtaacttaattatttagagcacttttttatacatattttatttttaagtacttattttgacaacatactagcgtggatttgtatataagcatatttatattatcctaataactaataactaaaagtcaattaaactggaggtagaaattaatatattttggttgagatttgggaaggtgaagaaaacaaaattcttaaaggtaattagatatgcagtataattcttaaagattgaattcaatattataaggtaatatccataggattgctatttaatggcatattgatatcatgagaaaaactcacctagcatatgcttatatgcttagctaagtttatgtatcaaaatattaaattattaagttcttgtactaaaacacacccatttgtcaaattattgcactcgaacgtttaattctcgagttcttacactatatcgcacccacccgccaagttgttgtactatgggtgtaatttataaaaaaaaagggcttttatataagaagaccaaatgagcaagggcaaaaataacaatttgccgcttagctagcacggttatcttccttcacaaaataaggttagccttaatcttcaatttttaaaaatgggatcaaataagtatagttgaaaaggtgagatcagattggtagagcctggtgaatagggtcaaatgagtacttgtttcttttccatatcatttaaatgttcgacccacatttatttttaattcatgtgatgactgagctaccacgtggacgccacatagcgaaaaccactctccaaacagccagtgagtcattttacatggtttaatagtaggatgggtcgatatacccggttttacggttagatatgcaaatattttgaaggagttgagttggacatttttgctttcccgaatgggagaagagttaatttgatattggcccggcccaagattttgtaagctcgtacggtagctctgatgatgatgttaattgacagatgcacaaggatgaagtatggactgtatggtttcagtgagatgtcaagcaagcgcattattggctgtaaattattttaattttttcttatgttattatgcctctttcatttaacgatgggttcatttggatatatagaccaggatacccaaatgcatagggaaatagacgttgtaatggtaaagcatgttacttttatggggcaattgctttgtttgaccatgttttgaagcacaactaccaatttgaccttttttttaaggtttgcttatttgacccagtttttcaaaattgaagccaccgtctaaacctgttttcactggtgcgctagggtttcggttagggaaataaagaaaataaatttgctatcgcgaactaaccaaaatacccttgattatacgtaacaatatcctaacacaactcattagcgcagaggaaggagaagcggcggcgactatgcgaggaggggcagcgtcagaggttgttgcgcggacggcagcggcggtgcaggcatgcagagcgaggaggagggagaggtggcgccgacacggagagagagaggaaggagcggcggtggctactgcacggccggcgatggcggtgcaggcgcacggattgaggcgggagggagggtgttaacgactaaatttggttaatcatagactggacttgggtttttttttgcatcaacagaggggtggcaccgacgcacggtgatgcgaggaggagtagcggtggctactgcgtggacagtggcggcggcgcaagcgcgcagagtgatgagggagggaggggcggcgccgacgcggagagagaggaagtagcggcgcgcggcggtggttgcttcatggacaacagcgatgacgcaagcacacggagtgaggagggagggtgggatggcgccggcggagagagagagaggaaggagcggtggtggctgcgcagacggcagaggggcgctgttgtcgtgcagaggaaggaggagcgatgttggtcgtggtgggagcagtggcagtggcacggcggtggttgctgctcatgtgtgccgcccctctccctccctcctcactccatgatttctatgatatgaattcgtggtttgttggagctgttgtagggacatgaatattagtggtttgtaggatatgaatttgctgttggagctctcaaatctatcaaagctatgtcaaatttgttataaatgttttaaaaagattcaaattaaaaaactttgatataaacatagtcaaatgagcaagggaaaaaggacatctggcccgtaagttaacaccgttagttggacttcacggaataaggtcaactctgatcttcatttttgaaaaaggatcaaataaacaaacctagaaaaatagggtcaaattgatagttacgtttcgagatagggtcaaataagcaattatccctacttttatagcaaagcaaatttcgatccgtatcaccaaaatgtataactgaccttaggctagcaagctgacactgatctagacgcgtatggttatttgtacataataaaaggttagttgtacacttgtacaaagtcaataggagtctatacgggacagcatcatatgggtccaaccaaattaacaacgcttaccagcaaattgtgggcattctattgtttcttctaattttcgaaattctgtaaatagcatgtgcataatcctgtcaaccattttttaaaaaaaaacaagacaaattactacataagttcatggttttaactatagtacaccgtaaaaagtaaagttacactctctaaatgtgataattacctagtggacaccactcccattatttcagtgtgttcgggctgatgacacatgagagggcccactttttgacacggcgcgatcaagttacccctattgtatatttagactaactggatccgtcaaccctttagagccctatgtcgccaccccaaccatatatatgctctattttgacattgccaccatgacccgttcatcatccctgacccactaggaatagggatgcaagggtgatctcgtgctaggagtggaattggcttgcagcaatggctacactgttgtcagagcagggcgtggaatctgttacgaagctggtgaatctaaaatgggtgtccaaagggtaggctcgatttttctttgttttgattcgattgggatgcatggtttgttgatttcgttgagttgagttcttttcttgatgtacttgcaatggggtagaaggctagatttgcctggccagcgtcagttgtcgagattggtttggcttaggacattgtcggagatatgggcccgagggtatgcaaagtgaggggaagttaccttcacatccagccgcgtggctctacagcctggccctacccccgcacctcgcgagtcacagaggcggccggggggcctcggggtgccacgtcatgcccctcaggccctcgcgctgcccctccccgaggccctcgcccaactaccatgtggtggggggagcaagcggggaggagacccaggctgaacggccatcaatgcgcggcgccccaactgtccctcaccgcgtttaatgcggtaagggcggacgtgcggtgccgcctgactgacccacgtcaatcgggtgtgaccagtctgtgaccggcctgttgtcggccacgtccgattggacgggtggccgtgcccccacgtcgcctctgtatccggcggagtggaggtaggtatgtcccgtcccattggggcgtcatccggggttccctccacgcgaggaggactgccacaagtcttcactcatttaagagggaatgatagggctgtcccccgtggcaggcggggggcggcgccgggtcccactaaaggacggactgccgcttagcttccgggcgaaggcacggatcgtggtccggtcaaggtaaagtgggtccctctcccgtaaaagagtaggtaggagcggcgcatgtggtatccccttgaactataaaaggaggaccttgcccgccgaaaaagggggacaactcccagcaggcctgagctttagagggagcagaccaagagcactctccagagttggggaacccttgtaacactcaatcataaatcccacacacaagagtagggtattacgctctatagcggcccgaacctgtataatcttggcacccatacgcgatctagaaaccctgagggcggatacacgatctcgagaggtgaaccctttcccccggctgaactcaaaaaggaggatctcacgatctcccgctagagaggatcattcctcgacagctggcgcgccaggtagggggaattcgcgtgcttcaaagagaagttattttcttctgccccaagttttcctccgccttcgacgatcatggtcgaggtcttggaggaggaagtggtggtgcacacccccactccctccgggagtgaggatgctagcgggagccgcggcccccgtcaccaccgccgcaactctcggactccgccccgccgcgacccctcgcggagggaggatcccacccggtcgggtggctcggccctctccccgcctccgggcggggggaagccatggcgcatcggagcgcgacgtcgcctgacatacggtgacggtggctcgccccgaggcgcgcttcaggcggcaggagcccttctacggcatcctcccgtgaactcggagccagagacccccgtccagcgatggttggacgacgtggccaacctggtcaccactgcctagcggcagctggccgcaggtggccggcccaccaccactagtacgtcgcgtacccccaccaccctctcctcgtcagcaaggaggagggcccgtcggtcggccacggcctcgaggcggtccacggccccaacgtcgtcaggggcctcaggaagtcggaggcatcacgatggcctctacggggagcaggatgcttaagcgacgccgggacgagcgccgtgctgcccgcatgggagaaggcgcctccttgttcggagtgccgcattcctcctcgcgaggcggtccgccccccacgttcacccctggagggactagttgtagggccttcgttgcgagtcttgggaatgtccggtggcccccgaagtttcgccccaacctcacggagaagtataatggcagcatcaatccctccgagttcctccatatctataccacaatcatcgtggcagcatcggggggggggggacgaccgggtcatggcgaattatttccccatggctcttaagggtcaagcgcgcggctagctgatgacccagccccctgactccatccactcctgggaggacctgtgccagcagttcattacaaacttccaggtcacgtacccccacccaggagaggaggcggacctgcatgctgtgcagcggaaggacgatgagtccctctgctcgtatatacagcgcttctgccaggtccgcaacactattacgtgcattccggcccacgcggtcgtttatgcgtttcggaacggcgtgcggcacaaccgcatgctggagaaaattgcctccaaggagcccaagaccatcaccgagctcttcgaactagcagacaaggtggctcggaaggaggaggtgtgggcctggaactcccccggcaccggcgcggcggctgcggctgcccccgagtccgctccccactctaagcggcgagataggagggggaaaaggaagccggtccgctctgatgacgagggccacgtccttgcggccgatgggccctcacgggccccgcgcaaggaaaaagccaccggcgacaggccgagctccaccgctacatccggcgagggtcggtcggcagacaagtggtgctcggtgcacaacacttatcggcacagccttgccgactgccgcttggtcaagaacttggccgagggtttcggaaagccgatgaggagaagcggcagggtcaacgggagggcaaagcccccgcgagccctgccaatgaccggcgaggggaggccaagaagaaggcccccgccgatgacgatgatgacagcaaggatctggaattccagatacctcaggggaccgtcgccaccctcgacgggggtgcttgcgctcacacctcccgccgtggcttcaaggccatgagacgtgagcttctggctgcagtcccgactcacgaggcaacacgaaaggcgcgctggttggaggtgaagctcaccttcgaccagagcgaccatccgacagtgctcgctcggggagggaagttggccctcgtggtctccccgaccatccacaacatcaagatgaagcgtgtcctggtcgacaggagggctagcctcagcatcatctccccggctgcctttgacacgctcaaggcccaagggatgaagctccagccgtcactgccgatcatcggcataacctcggggcacacgtggcctctgggtcacgttgagctcccggtaaccttcggcgactccactaacttccgcaccaagcggatcgacttcgatgtggcggacctcaatctgccctacaacgcggtcttgggcagacctgctttggtgaagttcatggccgccacccactacgcctaactccagatgaagatgccgggccccagcggccccatcaccgtcttcggcgatgtcagggtcgctctcgcctgcgcggagtagcgcgccgacaacctggcggcagccatggagccgcaggtcccggaggcctccgcgtcctgcgcctccaagaagcgcctcacctcggccgacgaggtgccagtcaaggagattccccttggcgatgatccgtccaagacagccaaaattggcggtaccttggacgccaaataggaaagcgcgctcgtctccttcctgcgggcaaactccgacgtcttcgcgtggaagccgtcggatatgcccggggtccccagggaggtgatcgagcaccacctcgccgtgcggctggacgcgcgacccatccggcagaaggtacggcgccaaaccccggagcggcaagccttcatccgagaggagctgacgcggctcatggaggccggcttcatccgagaggtcatccacctagagtggctggcaaacctggtggttgtcccgaaggccaacggcaagctccggatgtgcatcgactacacggaccttaacaaggcatgccctaaggatcccttccctttaccacgcatagatcaaatagtcgactccacttcagggtgcgaccttttgtcttttatggatgcctactctaggtatcaccagatccgtatggctagggaagatgaggaaaaaaaatgctttcattactcctgtaggcacattttgttatacaactatgccttttcatctcaagaacgcatgtcctacttttcagcgcatgactcgcattactttgagtaatcaaatagggcgcaatgtagaggcgtatgtcgatgacctggtggtaaagacgcgccaccaggagatgttattataggacttggctgagactttcgacagccttaggtcaacgcgcatgaaactgaaccccgaaaagtgtgtgttcggtgtgccgacgggcaaactcctcggttttctagtctcctcctgaggcatagaagctaatcccgagtaaatacgcacgatagagaggatgcgtccccccagcaaacttagggatgtgcagtgcgtcacgagatgcatggtcgccctaagtcgattcatatcaacgctgggagagagggcgttgcccctattcaagctcctcaaacgccctaggccatttgtgtggacggaggaggaggagcaagctctcaatcagttgaaagcttacctcacttccccccacctatcctggtggccctagggccagaggaaccgttgctactctacttggctgcgaccccccacgcggtgagtgccacccttgtagtggagcgtggcgaaggtgacccgcgtcacgagcccggctatggcaagggaccaggggcccccatgactggcgatggaccctcgtctcccgacggctcgttgcccgaagccccccaaaccccgggagggccccgaggcccccgggggaggaagggaggctctggcgggtggccccgacgcctataatcctgacatggcccgagatacccccgaggcccctaagcacgggcaccccggaccggctgctcctaacaacaaggaccggccccaccgaaaggtgcagcggcccgtctacttcgtcagcgaggcactccgaaacgcgaaaacacgatatccacaggcccagaagatgctttacgcagtcttaatggcctcaaggaaactgcgccactacttccaagcgcatcgggtttccgtcgtgatgtcttaccctctcagccaaatcttgcacaaccgagaaggtactggtcgggtcgaaaagtgggccatcgagctcgctgagttcgaccttcacttcgaaccacggcacgcgataaaaagccaggttctggctgatttcatcacggagtggaccccggtggacgaccctgttgcatccaatgccccccccctcctcggagatggaggagacccaaacgccaacattcgcgccgggcactgggttatgcacttcgacggctccctcaaccttcaaggtgcaggggccggagtcacgcttacctcgccaagcggggacgtcctccagtacgtcgttcggctcgatttccgagccacgaacaatatggcggaatacaaaggactcctagcgggattgagggcggcggccggaatgggcatccgccgcctcctggtcctaggcgattcccagctggtcataaatcaagtctccaaggagtaccagtgcaccgacccgcaaatggacgcttacgtccgcgaagtgcgacgtatggaatgccacttcgacgggctcaagctccggcacgtaacccgacgcgacaacgcagtcgctgacgagttgtcacacatcgcatcagcacgagccccactctccccggggaccttcgaggaaaggctcgcacaaccgtcgttgcggttggacccccccccccccccgagggacccggcgccacggtctctgccccaatccccgacgacccatgggcctcggggcccaagggggtcggtcccgaccctcctagtcaggttgtttggatgactgacatccaggcatatctcgacgataatactcttcctgaggatcgcgcagaagctgaaaagctcgcgcgtatctctaagcggtatgtgctcgtagaagggactctaccgacgcggcgccaacgggatactcttgaagtatatttctcgggagcaatgcgtcgagctcattgccgacgttcatcagggtgagtgcggggcccattcggcctcacgcacattggttggtaaagccttccgacaaggtttttactggccgatcgccttgcaagatgcccaagaatgggtcaagcgatgcaaggcgtgccagttccacgccaagcaaacccactagccggcccaggccttgcaggtcatcccgctctcttggcctttcacggtctaggggctagacatcctaggacccttcaaagcggcccgaggcgggtatcagcacctgtacgtcgccatcgacaagttcaccaagtttcccgaggcttacccagttgtcaagatcgacaagcattccgccctcaagttctcaggggcatcacatcccgattcggagtgcccaaccgtatcattacggataacggcacccagttcactagagagctgtttggcgactattgcgacgacatgggcatcaagctgtgcttcgcctcgcccacccaccccaagagcaacggccaagtcaagcgagccaacgccaaaatcctcaaaggcctcaagaccaagacatacaacgtcctaaagaagcacggggattcgtggctcgaggaactgcccgcggtactatgggcgaatcggacaactccgagtcgcgccacgggataaatgccctttttcctagtgtatggtgccgaggcggtcctaccttccgagctttccttgggttcgcatcgtgtcgcgctgtacgatgaggccaaccaggatgatcttcgccgcgacgatctcgactatttggaagagcggagaaggcgtgcagccctgcgagcggcgccctaccagcaaagcctgcggcgctaccatcagcgccatgtccaagcccgatcactgcaagtcgacgacctcgtcctgcaccgcttacagtcgcgcttggggctgagcaagctctcaccgatgtgggaatggccatacaaagtgatcggcgttccccggccgggctccgttcggctaaccacggaggacggcacggagttgcctaacccctggaatatcgaacacctccgccgtttctatccatagagttgcgcgtcttttgctttcctagagctcgggccaacccccgcgcatcctttggcttgtgctggcttggccgggggctaccactgttaaatatgttgtatcttttcccctccccatcaataaatttttccgcttaagcggaggccgttgcacgccttttcttactctttcctatggctcgtcctggttcaaaggacgatttgcgcttactccagaacctacgtggcgttgggtgacctgaaaaccgccgaaagggagcctaaacacgggccgcggcgaaccctgggggctcagaagggcctacacacggccatccccgacccccggtcgtcgtagcctcggtctggccagacccgctgggtagctccctcggggcgacggccttgcccctcgccacttaggtcccgcggatcgagcgcgaatttcccttttcaccggaacgagcccgagggggggtataaagtgggtaagagcggcaacttaatcactagaaagtcaattgaatacgttagctttggtttttcttctttccttgccgcagacattcaaaggagaaagcaagaacataaaggagcgaaggggaagctttatttacaaacaggatggcacgatggcctaaagtttgaagcgttcaccgcgagcacataacaaaataaaagaagaaaagcggagatagtcacggagtgctcgggcccccgagtccggcgccgctgaccacctcgtcccagtcctcgccgccgtcatcaccaccatcgacctttctcccgctctcctcgttcaaggcaagtacgaggttgaaccaaggggccgacccctcgaagttggagacgattgcgtcggccgcctcccggactcgctcctgagccctcgccttggtccccggggggcagtcctcgagcgcgtgccacgggaggaagtcggggtcgcgagcttggtgactcgtgaggaccagctccaccgtagcccgcgccaaagaagccgacgatgacttcacggcctcgccgacctcctcctccagcctctccaaatctgccgccatcccgtccagccggaacgcaagtgccggctgtgtaggcgggagcttcctgtcctggcgcacggagatgcctacccggcatcccgcgcgctccagctgttcgacggcgtcggagagttggccaggtctaatctcgttggtgaggcggagggccacgatctccccggcttggtcctgcaccaggcgccccaggtcggcgagagtgctttgagccgcggtgagttggcttaccaactccgcgccgctgggctgcccgcctgccaccagctctttctcgcggcctccagctcggaagccctcgccgccatcgccgcgcgctcagcgcgggcgctttccagatgccgagcttcgcgcccgcaacggcctcctcgcgcttcgcgagttgctcgcccagccggcgtgccgccacctcgcggcggttcacctcagcctcgcgtacggcaagcacggcgttccgttcccggcacgcctcctctcgaagccgcagctcctccgcgcaacgagccaccaaaagcctctgcggcgagggtggtccggttgcgctcggcagcggcctcctcacggaggtggagggaggactccgcctcggccgccgttctctcgtgggcggccaaagtggtctcgcgctggtctagcatgggcgcccactcctccagtgcccgggtacgctcctccagcacccgagcatgctcctccacccccgggctcgctgcgcctgttcctagctgcgcccgtcctgttcgcgctggttgcggtcgaggacctcgatccgtcgatggatcgtggcctcgaactcctgcgcggagcgggcacgctcgtccaaggccttacgctcggcctcgagcaccgccgaccgagcccgcaacaaggcatcgacctccgatgcccgcctctcttgggcggcagccgcgtcgaggactccacgggcgtcttcaaccctcttcaccagatcctcggcgtgggcctcgtactgcaggcggatgtcgcccagcacctcatccaggacgctcgaagcgatgagcgccgcctgccgctcctcctccatctcccgcatgactgagtccagcgtctcttcgcgcgcctggatctccgccagttgggcttgatgcattttgtgccccacctccaccatgtcgtccacagcgcggcgcccctcgtcaacccacgcgcggtccgccgcgagctgcgcccactccgcctccagggccgcccgctcgtccgccagggcttgaacttgggcattgagcccctcccggacggtggagtcggcggcagcgagcacctgcaggagtggctccatgctcgcaggagtcggagaagaaaaagtcgcggtccgcccccgggatgacggagtgctattgaaacccccgcgggactgggggctgctctcggcccccttctacgtggccagccccgagggtgccccagatgcagaggggaacggttgcccccgtcccccccgcctcgagccctcgggctgactcggcctcggcctcgggttcgggcccgcccccagcctcggcctctgggccacgacctgctttggcctccactcccgagtggcgctcctcgtgggtcgcgccctcgggatcgccccccgggggggcgccaccgccgctgccatcacctgtggctggctgcacctcggctgtggcggactcggagccagacccagcgtgtggcccgtgggccccgccagggtactgcgaaggccccatagcaccgagtcggccgggtcccggtcatccggtcgctcgaattttgacccctgcgagggatcagacgccgcgaccctctgggaaggaatcccgctaccggagaaccctgatcacgttaagaaagaaaagaagggggaaaagcaagaggccaaggtggatagagagcacctagtcgggtgctagcgatcgtacctgcgaggggggcatttgaaggtctacttcaagggcccgatgaaactcccccggcacggctccgtttgccctatctttcgaagccgcttcttcttccatccagcctcggacgtggcggggcgtttgtggcccgttggtggtcggtccgccgttcgctcggcgccccctctgcgcaggggagaaggcggccgagattcggacacctttcgcttcccgttcgggttgctggccaggcccccccccccgggtccacggctcggactgggcgccctggagccgccgcccccgccagagacctgcggtcgcgccgcagctacccgcgccatcgccgccaccaccggcgccgccccggcgggaccgacccctgccagcaccgatggccgacatcacaaccaggatactctcccggtcgcggtcgctgcagagggcgaggatcccgtccggaatcagcgtttgctcaccacccgccggatcaccgtcttcgcttcctccttgccccagtcccaacgctcacccacgtgggtgcgaatgggatcgttgtgcccaatgtactcccacgcgccgtgggaccgctcctggagaggcgcgatgcgacggcggaagtagtcgccgaacaccatcgcccccattaggccctggcttcgcaggcccctgaggcgataccgcacagcgtcgtactcctcgcctagttccgaaaccgctaaccacgcggcggatcgttcgggagggccggcgaggagccgaagtcgcggatgatccggcagcgcggtgtagaaccaatccttcttccaatcctcccacttgttgtggaggtggctctcaatgtactgccccgctgttcctggccagggctggaagtagcatcctcccaccaccgcgccttgcagcagctgtgggacgaagaaggactggaacagccgcatcgtcggccgcaccccgacgaacatctcgcacaagtgcgcgaagatggccagtgtcatcacggcgttgggtgtgagatgcaaggcatgaatttcgtagaaatccaaaaccttatggaagaacctggagaatggcaggatcaaccccaccatggcgaaggacaggaggtgcacggatcgctctgggtaccgcggccgcggccgtgactcccccaccatcatggcggcgtcctccggcatgatcttgcggatgaggctaaggtgcctctctgccgtgatgcgcgacaccgggagcacaacgtcactagcgtcttgggccatgatgaccggcggggaaacggcgaggagtttggtgtacggaatagcgtggagcgagagaagcgttagggcttgaggagcgagtgtgcgggcgagcagtcggcgagaggaaggggacgaaatctccgcctccctatccttttatccccgcctcgaccgcgctcgcctcctcgtttcacgccctcgcggttgcctcctcgattcctacacctgcggttgcctcatcgtttctcgcgtccactcatcacatcgcccattgaacccacgccccgcgtttagtgcgcctgtcagcggcacactcggcgcggggcgtgcgatgttcacgggcgcgattaggcgggcccgccgtcggtcccatcgcatgcctggcaggtaggggagtcgaggcggcatgggtgacgattctgggcatggccaggtcgaccccctgattttcgcgccctaggcgcccccatcatcagcgcggttaatggcggtcaaatcgccattatggctaatgcgccagcctggccgctcagcggcaaccatctgggttccccgccgggcccacaacctcggcacgggaagtcgtgaggcgccacgtcagactgccctcagggggccaatgtccgacgcggtgccgggggctactatcggagatatgggcccgggggtatgcaaagtgaggggaagttaccttcacatccagccgcgtggctctacagcctagccctacccctacacctcgcgagtcgcagaggcggccggggggcctcggggtgccacgtcatgcccctcgggccctcgcgctgccttgccccgaggccctcgcccaactgccatgtggcggggggagcaagcggggaggagacccaggctgaacgaccatcaatgcgcggcgccccaactgtccctcaccgcgtttaatgcggtaagggcgaacgtgcggtgccactagactgacccacgtcaatcgggtgtgaccagtctgtgaccggcctgttgccggccacgtccgattggacgggcggccgtgcccccacgtcgcctctgtattcggcggagtggaggtaggtatgtcccgtcccatcggggcgtcatctggggttccctccacgcgaggaccgccacaagtcttcactcatttaagaggaaattatagggctgtcccccgtggcaggcggggggcggcgccggatcccactaaaggacgaactgccgcttagcttccgggcgaaggcacggatcgtggtccggtcaaggtaaagtgggtccctctcccataaaagagtaggtaggagcggcgcatgtggtatccccttgaactataaaaggaggaccttgcccgctgaaaaagggggacgactcccagcaggcctgagctttagagggagcagaccaatagcactctccagagttggggaacccttgtaacactcaatcataaatcccacacacaggagtaggatattacgctctatagcggcccgaacctgtataatcttggcgcccatacgcgatctggaaaccctgagggtggatacacgatctcgagaggcgaacccttttccccggctgaactcaaaaagggggatctcacgatctcccgctagagaggatcactcctcgacagacatgtttgagccagaccatctcaatttgagccggatacgcttacacaatttttacaatttgaccctttgaaaaaactatttttacaaatgaacctccgccaaaacttatttcaaaaataacccttttttcagcgccaaatcatgtggcgctgaacttagacatctcagcgccaaatagtgtggcgctgaatgtgcgttggcacgctgacttagcctcccatccgcgatggcacggcattcagcgccagtagacgtggcgctaaggtgtcaagttcagcgccagatgatgtggcgctgaaaaaaatgttatttttaaaataagtttggcggcggttcatttgtaaaaatagtttttttaaagggtcaaattgtcaaaatgtgtgatacacttagggccaacttggtcaccctatgtcaaaaaataggccctctcacacgttgttagcacaaatacagtaaaataataggcacaatgttcattagctaattaccacattaatagtgttttcccctataatgttactcttgcgatgtcctaaaggtaaaactagaaagcctcaagattctaaatgaaacattgactatgtatataattaactagactccggtcctcaaaaagcgcataactccataaatatatattctagaggtacatatctcatccttgaaaacaagtagaacatcaataattacactactggtaccacacacgtctcacataagttcataatctggcaaaatatatattgcaaaccatatatatagtggaaacatgtaaactacatattgttgaatcaaaatgcaaaatttgctacatgacacttaaaaacttattatctttgctggtagacgtcgtaagaatgtgattttttcctaatgacacttcgaaagcgtggtaatttgccataggacaccgagcgcataaaaatacaatatccacccaattgatgagagaaaaactatgtaaaatgtttgttttgccctcatcttcttctcccttctcatcttcttctcccttctcctggtcttcttccgacaataggcatcggcggtggagctatcatggacctctgccttacttccctcgcaggacatgatggttattgccgagatctacatgagatgcgcggtgaggttcttggtgtcgatcagagcggccgcctccacgcgggtgctggcgaaccgtctgggccaatcgaggaatctctcaacgacgagcgacatgttggggaaaggcggtgaggtagaccggcgaggcggcactgcgggcaaagctacacaggtggaatccaccagtggcgcgacggaagtattggcgaagcaggcagggtccggcggcggtgagaacatgagcgtgcagtggtagctcaggaagtgcagcgcgacaagcagcaggagtataacgagcaggaggactatagcggtggccgctggggtgatgaggaaaaggtagtgggagtggttgttagcgggaggagagggggcggtgccgctactggtggtggcgggggcaaggaggagtccacaagggcaaacttgtttcttatgaattttctctttttgtttccatcaaatataataaaataatacgttgagtatacgactaattaccatatttctatggtatccacgaactaacatactttctttagataatgtcacgtagcaaagaccatgatattttatatcatgcagcaaattttaccgaatcaaactagatgcctactccctccgttttaaaaaaagacaaaccctggtttccgtgcccaacgtttgaccatccgtcttatttgaaaaaattatgaaaaaaattaaaaagacaagtcacgcataaaatattaatcatgttttattatctagcaacaatgaaaatatgaattataaaaaaaattcatataaaacggacagttaaaattggacacggaaatccatagtttgcctttttttagacggagggagtaatatttatccacttcaccttagcacacacatgagtagtcggtgccagggaaagagacgatgggagatgccttctgccgataacgatgcttttttttttccgaaaatgaggtgcgcctggtttgcgtgtcagccggtccgtcactgatgtgtacttaccttccgtttttgtgttaaacagacaagatggcagccatccttgctgcccatggactcagcctgcctgatacacactcagagtgcacagctccttttgccttggtgttgcgttggtcggcccacgttttccttttacaagaagcgaaaataaaagaaaaaaatgagcacctctcctgcagcaagcgaaaatagagaaagaagaaaacgagcaatttcccggaagctagagagagagaaatgaagcagaaagaataaaaacacaatcccctgattagaagtcacttcattaggccatgggcgtttctaggccttcaaatatatcagcgccatctcgtttcacttacgtttttttttaaaattacgcagtacaacgcagtcactcacaacacgcaaaccctacccctatgagcatcttcgaagactgggccggcaagtcaccacaggcacctcgctgtcgacgggtacgtcgcctaccactgaaagcataacgcgcaaaccctacccctatgagcatcttcgaagactgggccggcaagtcaccacaggcacctcgctgtcgacgggtacgtcgcctaccactgaaagcataacgccgttaaatcctggaaaattcgctcctatggggagtcgaacccaggacctcaggtgctactgaggctcttgtaaccactaggttacaggcactttccctcgtttcacttacgtttatatatacatgcatcaaattttgtattttaaaacttaagatttaagttgatttttttcttttttccatcgtagattttttttatagtatctgcttttacatcatatgcctatataaaatttctgaaatcttggaccaaattaatcacatagtccttgccaagaaagagtgcatgtcgtttgctgcttgaactgttcatctgttacttaacatgttatatgtccgcaagctggtgttaaagtgcctatatttgtggctctttgcatgtgcctatgtcctagtaatatggttgctaaaactaatgagaatatttctttttatgataaaagagttagttacatctatccattgttttgggaccacaactagagaggttttcatgcttttcaaaattattcgtaaacgaataattggttcatattcgatctatgtgtgcgtccatatgttacaaattaagcgatttttcttttcaatatggcttgacaggatttgattttttttttcttttcaatatgcaatgtgtcaatttttacgtggaaacaccggttcttttaggtaggaggttttttcttaactaagacatgtggcttttttacatgagagaaatacagtggttgagaaagaactggaatgaaggggttctatttttttttattagtagagaactctgagatacacaaccggatactagtattcatattcatgttcgcatatctgaaaaacgaaaacgtgaaccatttcaattctcactgccatgtttggctcgaatctctcgacttgatctgcacgttcatgctcattcaggatgcaggaggaggaagcaaagcatcctgtgcaacacggcaacgccggatccgtgcaaaaccaaacaaaaagcatccatccatccatccatccatggcagatttggcaggcctgcacagagcagagcagtaaaaaagaaaggagagtgcagtcaaaagctctcctctcctttcctgaacgggaaggcacagaaggcgtaggacagtcggaaggccaccacatctgcatgccattctcgtcattctcattctccctccaccgtggggcccacccatcacccctaacctaaccgccgtcgattcagggaggtggacggccaggatggaggcggcgcctcccacgacgcgcgtggtgcaggttcagagcagcagcagcagcaggtgtggcctccacattattaattcctcctctcctctcctctccttcctataagagagaggaggtggaagaaagcaaagcttagagagggagagagagacgacgtgctcatcgatctggttttggttggaaggaggcgcttcaggtcgttgctctccatctctctctgtgtgtgtatcctcttgttgttgttgttgttggtttcttggatcttgcaggagaatcttgcttcgtttttgctttcgcgcggatggtggtggataatctcctccctcgtcgtcgtcgtttttttctttctgggtgaatttgtttctgcgttgcacgcgtatgatatagctatagggtgggttttgatcgatcgatctctacgtgcgtactccatagtagatggaaacacacatccaagtactaggaggatatgggtttctagttgctttatatataccatgtgttcctctgctcgcttccttgctttttctccattttgcttcgattgattgaatgatttccacttggtttggttggtcgatctccatggaatctctcacccatccatacggaaatgccaagtctgcgtacgtctgcgtgctccttttcttgttgttgttgtaggttcatctcgcttctttgcctgctcataacacatttctgcacctgcatccaagccaagcagaagcagagctctcggcatggcggcgccggcggtcttcaccatctccggccgccgtcgcccgctctgccgacgagagagagatgctgccttgatgctttgatgcttgctgggctgtgtagtcactcactagtcaggcccatggcccgttaggagcctttcactggcccacgagagagagagagagagagaggggagaggggagagcaaccgcttgagcaacggagggaggcggcgccggatttttggtcgatttgagaattgagattgagaagatggattaaaaaggaaaaaagaagggggaagggaaaggcataaacatctcagttgcttgagagcactggttgtccatgggagagggacatttaattatttgcaacttttaagatgtgtcaattaagaatttatcactcgctgtatttgacatgtgggtccttatgtgtctatgacatgtgagtttaatggcaaatcctttagaactactcggaagagtggcaaatagttattattcccatgggggaagttatcatgggctgcggtgcgactaagtccgactgaactgatctttgatagttagtgagggtgcctaaaaggtttcttgattatacatttatacttggactgtgtagatatttcgagtttcgcttctatagggctgtttctgatgcaattgcaatagattgcatcacctctgttcattggcagtagttttgtttgctggaactttactggattgttgcttaggctagttcaggggtgcaaatggggatggcattgcctatcaggtcttctcaggttatatacttttcctgtacttgttctgagtgtagtggttcctgaaatgttctgtgctggtttctttaatggaaatgggaggggatctgcccttcttgctaaaaaaaagaagtagattgcaaaatgaacacacatcagtgagttatttcaaaactgtaggattttgtgttgcttgtttcataattattttgctgctgacttatttcaattcttctactgaagcacatttagtgttagagaatctgtaacactgtctaatgttgtgtcatgcaaatgcaaattgaaatgcaatcgtaattcctattctaatcatgaatgaccattgccctgttgttctgtgtggtcctctgatgttctgaacaatgccatatgcacacttactacatccttgcttgatttttttttaactgtggttgtaacaaaggtgcatccagtgctgttttcgagctcaatgcaatgttctcacctgaatatttccgtgtcactcaggtctgccatggatttcacctccgacgagtcagagctaagtgatgcagatattgatgactatgctgacaagtgctacatggacctcaagtctgggaagccggtggtgagtctaggcaatgaaaagttcagatgcccattctgtctggggaagaagaagcaggactaccgttacaacgagctacttcagcatgccattggggttggcgcatccaatcgcgctccaaaggtgaaggcaaaccacatggccttggccaatcttctcaagaacgactatgctgatgcagcaggctcattgccatcacgacaggccattggaccaagtaatcctccaaggccattgcaagatcaggaagcgtatgtttggccatggatgggcatccttgcaaatgttccagctgagaaaacaaaggaggatggagctagtctgatgcagcagctagctaatttcaatcccttgcagtttactgctgtgctctgctccgagggtaggtatactggttatgcagttgtcggtttcagcaaagattggattgggttcacgaacgccttggcattccacaactacttcaaatcacaacgtctgggtaaaaaggattgggcagcacttggacaagagaagtacatctgtggatggatggcaaaagaagaggactacaaatctagtgacccagttggtaggtttttgtcagcaaatggtgatctgaagaccgtgtctggtctggaaaatgacctgtctcgcaagactgagactctcatagctaacttgtcacaccagattacagctaagagcaagtatttggtggaactggaatgcagatgcaatcaaatgaatctctctgttaaaagggcaatggaagaaactgacttgctgcacaaaagttacaatgaaggtacatactacaaactgttcatatgaataattctcatgccatgggcatatgattgctatgttgttgtctacttttattgccaatttgccagaataataatatctattgtgttgtttcattttattgctgttacagaaatgcgaaatatgcaatctgctgctcgtgaacattcacagaaaatatttgaagagactgatcagctgaggaaacagttggatgataaagagaatgccatcgagaggagatccaagcaactaagcaagtttgttgctcaaactgacatagaaagaagaaaattggagagtgagatgaaaaaggtatgaatgtaaccacagctttgctctctttgctttatgttactgtttagcatttgcatttcctcttcagagttctatcttcaggaacagctatgacaatctttctaggggtgacaggatttctgtatacttgtcatgtatctatattacacttcctgttagctccgcatttacagtctggttacgatgatctttgttagaatatcttatctgactgtttgtcttactgatttcccctacagaactctgagcaaaacgactccatccacatggctagaatcgagcaacagaagtctgataaaaatgtgctaaagcttgttgagaaacacaaggtctgcactcttgtttccaattattaatcttatgcaagattcttttaatttctcatgctctggaatttactctggcttgtaaaaatctcacagaaagagaaggagattgctctgaacaaaatcctgcagttagaaaagcaattggatgaaaagcaaaagctggaactggaaatacaacaacttagaggaagactgctggtggtccaacacatggagggagagggtgttgatgtgaagaaacgtactgacgagctgactgaggaactaaatgagaagattgaggagatggaatatatggaaggtctgaatcaaactctcattatcaaagaaaggaagacaaatgatgaactgcaagatgccaagaaagcgctgatttctgtaatgtgatgatatgctgatctttcctttctactgcttgacagagtctgaagatattttcatttgtgtttatttggactcatttcagattcaatcttattatactatgattgtggctgagacctgagtttgtgcgtatgttttgtagggcttatcagaattgttaggccctcgtagcaccatcggactcaagagaatgggcgagctggatgagaaacccttccttgcagcttgcaagaaaaggtatggtactgctgacggtgaagctgaaataaaagctgctgaattttgctccgagtggcaagaaaatctgaaggatgccaattggcatccgttcaagattgttaccagaggaggaaagactgaggtatgctcaacagaatgaaatcttctggcacagtttttcgcattcgatctcccgacaaatatatgatctacacttccatcactgacatgacaacgatatccgttttcttttctgtagcaaatcatcaatgaagatgatgagaagctagtgggcttgaaggagcagctcggtgacgaggtctacaaggccgtgaccacggcgctgctggagatcaacgagtacaatgccagcggcagctacgtggtgtcagagctgtggaacaacaaggaggacaggaaggccagcatgcaggaggccttgcagcacgtcctggagcagtggaagcttcggaggcgaaggagatgaagcacgcctttcactcacactggattgaactaaggctttttgttcatgcttcgtagtgctcagttattttttggatgggattatcttggcttagctgaaactggaagattatgcattgtgtgatcctggtttctcgctctgattgaaatcgctgggataaacacattaaggtcatgaactacattctgatagaattaactttctgatattcactacattctgatagaattgtgctgtcagagcataaatctttttgggacagtattataagaatctgtttactatttctgagacaattcctttccccgaactgtttgagttgttgttgatgatgatgatgatgatttcttttcgtacccttgaaaaaatacagttagaaagagttgcatatttggaagcaacgcagcacaatggtagcttcataggcctagatgtgatgtacattatgcaatgctggacgcctggaacttttgaattcagtaacagcagttgatgagattactctagctgtaaattaaatttctgaagacttcagattagtgaaggctaacattcagcatcatcgcagagtacacaagggtatcaacatcatacaagatccaggagggtgcagaataccgtaattaaatgttaaatgttatctcttttaattgttcaagagtaacatatatttgctgcatggtaattaggtgtatttagtcactttctcgtctcactaagagtatatatctagagctttctgaacatgatgggtttgcaattccctttcatttttttttctgagaaaggaacatgtgcatattatcttataaacgacattaagtaattgaatttttaacattttacagtttcaccatttcgtcatggatggatacttaacacccgaatacccaatcaagcatagatgaaaacatacaaacccagaaaatgctctgatcaatggttgcaaattacaagcaagaaagagcataatggcctcccatctcaaaatggggcacaagggcaaaagaaacaaatcgagaaatttcttatcatgtgatcaatcagaacccacaaagctcaagccgtatttttttttcatggtcctcacacgtcagccctaactaatttagggcaggccacaacggctacgtggaagaaaagtggaagcaacacaaacaaattacagaagcgggcacaggtgcaccacacgcatcacccaatatacacctaaaccgaatccgaatccgaatccttctctcttgttatttcagttcagctgaataggtttggaatgcaggctcccgagtcaggattctgctgttccttccagattcggccggtgacccgcaatttcaactctttcctctctccgcctgagaagaacagagccatgttccgctgaattatgaggccgtcatggctgtccctaaccttccggtggctgtcccttatgctgcggggagtgccctcccatatcatcttccggccattcgcgccaacctcaaggctataactatagttcctggcatcattttcgtcgcccataaaacggaggaaggccatgtaaaccggagccactccaagttggaaggcctcgaaatgcaagcagaagtactgcccaaagcagtgaaagacctaaaaggataataaataagtatcaaatatcaccttaaacatggataaaaaaaactcttgcagttaaattgtaccacccacaccaatatatatgttaatgagactgcaagtgatagaaggcaataaaggtaaacacttacagtcaacatccaagtagcattttcgacctctctggggtttgacttaacatagcgatggttgaatgtgcaccctgagtgcatgtcaactttatggtcatccctcagatgagcaactaggaaaggaatatccccgacaactgagcattcagagccagcataagggcagttgtatggcctgaaattgcactgtgattcatgcttgagtttgctgtagtacggaaagatttctggacaacctagtgagtaatatttgcagggtagctcaagcgattcagccactttctccaatgctagacatctaatatcaccaagctcctgtcgacaggttgggcagcggttgtgcacacgggttttgcaggttgaacacagagtatgaccattttggcactgtaatatggcaaaaaatattagtcaattattaattacttatattgaattctgacttgtaaatgctgaacctagaaagattcaagcttcatgctaaaaatagctaaataggacatattttcactcagacaaatttctaccaggagtattactaaagcaagaactacagaaaaatagttaatgtcaacaaacaagaatgtactgcatcaacacaagatgaaagatacagtgaaaataccacaaaaaaagagagggagagggagaaaacatgtactatgtccatgtatttgtgatggaataccacagacgcaaaactcacatacaaatggtacaacatggacttttgtttaaaagcttcctgattcatgagatattatgaaatcctaacaagaaggattaaaatatggtttttattgtggtttgtaactgcttttggaaaagttcagctctttctggcataataacatcattgtccgcattaattgcctgcttagtagctaatcagaaatattttacagcctgggcaagcttcactatagctaatatttactaccgaaattctatctcaaattttctaattacatggaattttaatggattatccatcgacgagcccagatggatgtctggggtcaccgggcggtagatccgcccctgcctgctctatatgttgtgacgactcattgagatcattcatcaaacacagtttcctcacttgaatctgatcgctgtgccaaatgttgcgataaaactacatgtccgtgcacaggttattaataatggtacgtctttatgtttgatgttaggaaagacttctatagtagaaagatacttaacctacacctctaacaggatcacagaaagcatgcttggtaattcttcaggctcccagtgacctaactagcaacacaaattcacaatagacaaaaaaataataatctccaagccactccagatatgaaattttggtattataataatctccaagccactccagatatgaaattttggtattataacaaactataatgtgacaacatatccctgatataaaaaagtgtaacctttaggtcagttaacaggtcatcacttcgttttaaaaatgtgacacatcatacgacaccatatgaccataatagtccatcaagcagtaatacagtccaaagtgcatgcaggaaaagattttgatacattgggcaatacttcttaacaaacagttaatacagctgcttccaagtaaattttaataaaaaggtaataagttgcaacagaacgataaagaaaacgaaataacaggtaacaaaaagaataaccgatcatcttaaactacatgacatcttccatgtcccaacttaagccttaccttccacttgtgtaagggcatacaagcatgcatacaacacatcccctagactacaaaaagaaatgcactaaaaaaggctagaaatgaactgttctatacaacccaacacttcactagcatttgttgtagtgatcatccttgcatcccagtgatattttccactaccaagcatctaataccatgaaagagggcgtcaaagtaaagactcatgggattcgcgaagtgacgtaacaaggcaaagataggccgatcctcatctccaaatgttctgccgcacatgctgctgattccagacataagaatatattcacaacaggagatactcgattcctctcccaaaaagaaaaaagaaagacgaaagaagagatactagctaggtgttgatatttggtttcaatttgccgtaaacctgtaacctaaatggggtcaattataccgattgcattaactaaacgtgaagagcagtggtgtcactagacaataatcagaacaataattttatctcctgaaatgagaaattgctggatcctctcagtccgtaattgattatcgttgtttaaacagcattgcaagttgaaatcaacacgccgcggcaaccatcctatcccctgaaatgcagcaagcacgccatgttttcccgtggcagggaaaggcagtatccaagaagccccaggatcaagaacccccaaacagacacgcaacgaagatccagccctctcacagcaccggatcacgcgattccaccccaccgacgacgactcccttgcggtgagaggagatcctagtagtagaaagaaaccgcaagaaccccaagaatggcggacctggtggatgggcgggtacatggagttggtgcagacggggcactcgagcagctcgtggacgctcgtcgccggggggacggcgggggccccggccacgaccccgacccctcctcctcctccccccgcgccccctccgctgcccgcggagacgacgaccacgttgacggcggcggcggcggaggagggcttgacgaggatggggcgtggcaggtgggagacgccgccgacgccgacgccatcgtcgtcgtcgtcatccatgctgtcggagtaggagacgcactcgatgctcgccatgtccatggccacagatcgaacccgaattcagctctcagctcagccccccgcccgccgcccgcgagcccgccggggcagggggagtcgatcgggtcgaaccctcgtcggaggcggagggtgatccgccgcgattccgattagcggcggcggatggggatttggaattggatttggagaggaggggattgttgcgttagcgtttgggttgcggggtggtgtggtttggtggtgggggcggttgattgcgggtgtaatggtggtgtggtggtgcggggggattgggtgggggtggcttgtaattacgtttttcttttgcttgtgcgcttttttagcgacgaggggaggggattcgattttatataaccaaacaaacaacaaaaaagcgtggtgatgatgcggggggagtgcggatgaggtgggggtgcggcgaatgttcaaattttaaactgacgagggaggggagcggtggcgttggcgtggtggcaaggctggccggctccgtatgctgctttgctgctggctgcaaatgcgatgctactacttctggtacatgtggcattcattcaaagcctgcagcagcattcgattctcgtgctactttgacagtctctgagtactagtacggcactactagtaaaaaagaaggaaatatatactgtcacggtccttcaacaatcgaactattcgtcctaaaagggatcaatttgtactaggaccggccttcttcaacccattttacgtttgaccactcgtcttatttaaatttttttttacaaatataaaaaacgaaaagttacgcttaaagtactgtagataataaagtaagttacaaataaaataaataataattttaaaaaaaattgaataagacgagtggtcaaatgttacaagtaaaaactcaaaatccattatattatgggacagagggagtagcaatcaaacattcaaacctcttctctgctctttgcactgaggtaagcattcaaatttttgtttagttccaaaataattcttcaaccttcctaactttttcagcacaatttttttacacacacaaactttcaactttttgtcgtatcattccaatttcaaccaaacttttaaaattttgatgtgaactaaacacagcctaggaatgaaaagggatcaatttgtattaggaataaatatgaatgaaggagtacgtgccgagagatggagtgcagatgataccaggattctacgagtatatgcggagaacatgaacaagcgaaggtctctcttctcttcttttctggtctgtcaccggcacattgctcacccacgagagccgtggtcgggtgagcgtgcctacacgtttaccagaataacaggcgggcgtggaccaaccatactgtacaagagattacccctagaaaaaaaaatatggttattatcaactttacaaagagaccaagaaaccggtaccgtcgtcattaccagaccaggtatggcggccagtttctttcaatgattttcctttttccaaatgatcaggactttttcgacataaaatgatgagaactttgaacacatgcttgctgcttaacctcccctgccaaagatgcaataacactagtaactgcacctgatcagtgtcccgacaatatattgccagtaatcataatgcatcgctcgacaggttccttccaggaaatgaacaggaggcttggaacttcatcatggccatgagaatctattcccctttaccttttctttttaaaaaaatgtcacagaaagggaaggttttgatcgccaagagaaattgcacccccgacatggaccttatacatgaatgtatgaggaggatgactttacatttgaattggctacagttacatggccgataacaagttatatacataattactgttgtcaggaatccctacatgctggccactctagaaggggcttctgtatcaatgtcaggttctccatccaccttctccgaccgtcgtagctgaaacgtaaatcttttaggagcgtacaaataagtgaagatggagaccaaccagaaatacaaaggctggtcttactaattaaacaatacgacactaccatgataagtgatgcaactgtttgcttgttctcccaaaaaatatactatatacatatcaatcgttgtctctactgaaaaatcaggagtgatgaagaaaactgataaacatgatgtattaaatattacttgaataagttcatcaccactagcatgtaaggctcaaggggaatgtaacgactgattggttctttaacattttcaacgtatatttctaccagtaactagaagtcatctttaggtattctgaggtgaacaggccagcaggggaattcacaaaataaactagccaataaaaactgctgaattagcatgcctctaatgtctgcaaccccatgtctagccactgaaatataacaggagcaacattaaatgctgcatcccatatctaaataatagtgctaaacggtcaagtgcacataagaaagacttttgaggtaacatcgtgtatggaaaaatgatgatgatgctcaccgttgattctttattatgttcatccaagtaaaggtccaatgctccttctccacaaagaatcttggctccagaaccatgctgatttgtagatccaacagagtcttcgtcaacaacaaccgcgtctattttgtcttttccagttcgtatttctggaatctgtaaaaaaaataatgttcattacaatggtttaagtaacaacaggacttttgacatagtaaaactgaaaaaaaaaacctactcaaacaatgtaatggaaccaacggacaaccaaaagtgtaaggccccgtttggtagggctccaactcccaactctcaactctaaactccaactctagtgagagctggctcctataggagttaaagtggatatgaaaagtgtttggctatattggctagctccactcgaccacgcccttgttggaatttcgtcgaacaccttggtggcgtcgctggcgtcgccgccgccgctcagcccacgcgccgcctccgccgccgccgccgccgctcagcgcctcagcccgcgcgccgccaccgctgccgccgccggtggtcaggttgcgggccgccgccgccgcggccaccacgcgcgcccgcgcctcgccctgccgccgccgccagcgcctcgcccagccacctccgaccccgcgccaccgtccgcacgtcgccgcccgctcgccgccgaccccgcgccgcctcccgcgcgctaccgccgcccgtgcgccaccgctgctcgcgcgcctgccgcgccgcctccgccgcccgcgctcctcccgccgccgaccgcctctgctgacacaaacaccaccgtcggccgctgcgttcaatggcagatgggggaggacagagaacaggaggaagatgggggaacgggaggaagatggggaggaaggggtagttcaatggcattttggtgtaaatactctaaaataattaagggtagtgggtcttttgaggtggagtggagttgtagagcagcaaaaacccagctcaatccccgtagtacaaatttgtggagcagctctgccaactccgctccaaaatattgagaatctataccgtttggcacagctccagctctaggtaagttggagtagggagctggatctatgccaaacggggagtaactcaatacaagatatttactccttttgtcccaaaaatataggtagctgtattgagggatcactacaattaactccctgcatagtaaaatatgttccatctagtttgaaggtttaccactcaattttaacgttcagaaacacaagaaaagacaagccaagaattttagcgcatgggaagatctttgattgtgaaaacaatatggtagtatgtataaatttcctatagtaaattcaagtttggatatctggggcattggttttggttcctttctgggttatgtctctagagtctaaaccagacatgatttcattggtttgactaatgaaacagtgcttatgattggacttgaaccaaaaacaggcagagtatcattcttttttgtgaattcaatggttgagtgaccctgaaaagctagaactgaatcatacaaaaaaaaaacaatattccaggttcacgatgctgttccaaattgatttcctaaaatgctataaaacctcagttgacaaatttcagctagcgggaagatacaaatatatacctcgtacatggattcagtcaataaactttctaatattgaccttaaacctcgagctccagtgttcttcgctattgctcttttggaaataagccgtaaagccttctcagtaaaatgcaacttgacctataatacaatgatgtgatatgaaaacaactaattaaatggttatacttcagaatattctgactctaaacaaagttccagaatttgtaagaaatactcgcttacatcattcatttcaaacaactttgtatactgcctgcctagggcattctttggttttgtaagaacctgcagtgaataaatgtgttaagaaagatcaattaattcatgtacgtaggacctagaatgcttaacaaagtataaggaaataaacttgaatgttgccaagtaaacttgaacctgcagtgaataaatgtattaagaaagtacaattaatttatgtacgtaggacctattatatatcgcacttcacagacagataatgcctaatggagtatatagccagtgtttttcaaaatcaagctgtatggacaatgtgcaaaacttttgcggtcacaaggcaaaaatacagtgattgtattttggtaaaaccataaaacaaagtcaactaactggccagtaactgaagtatgtctcatcaactgaaaattatggcagcatgcgaaccaatttttgtttgtggcagatgatggcacatcttacccgaaaattatggtagagttgataaaaaaaatatgcatgacaccaagaaccaatctgaacatactactaaaatacttcttggataaatgcttaaaaggtacgcagaaaccttgaagaaagcaggatagccaataaaaattggcagtctgtgattggaacaataataaataataaattgaagcaacatgtgccctttgacagaaagaacaattaaagagacacagcacatgcatgcatcgcaagttacctcaacaagttggtcttcactaagggaagatagactaacaagaatgggaaatctaccaacaaattctgggatcaatccatatgcaatgagatcaccactttcaacctgcatatatttcgacaaagtaagaaccctaaatatttcaaaggattctaagcatgacaagtcacaaaaccaagtatatgcattcttctacttgatcactcactgattcgagtaacgaggatgtgatctcagcatttatcacacccccagtccgcatatttgaacgaattggtgcttggaaaccaatggaagaatcatgtctcctattaaagattcgggtgaaacatataataagaaaactcgaaagactttcagcgtaaaacataaatgatgcaggatattgaaacctttccgaaatagtcttctccaaatcaacaaaagcaccaccacaaatgaagagaatgttttttgtatcaatctgcattgcaaaacaaaacagcataaaaccatattaaatagtttaacaagaacatatgaaggttctagttgtgcaaaagccaactggttgacactattttaggtatgtaaataaatattttcgtttacatgacatagttaaaaggggcaatgagaatttccattattatattgcactgcattaaacatggagggcaaaagtgttgctcgaaaagatgttcatagtagtaaagtgaagaaaactaataaaaacaaagcatcttttctacagattgcagagcaagcacacaaggtatcaaaaaacaaatggtctatttccagacaacagataattcaactcagggaattcactatcttctactagatgcaaggaataaaacagaggttctctgatgtcagacaaatatgaaatagatagcaatatggcaaaattggttcataggatacctggatattgtcaccccttgggtgccttctagcccctttctcaggaacactaacgacctatcttgacagcataaaagcaattgtaagaagatcagtaattaaaaaccttatgcgtcatcagtttttaaaaatactaaaataatcaagggtgctatcccataaataactaacatggtaacacttagattttcaaagagattaatctatgcctatcagcaaaattgaaggaaagagcagctttacgaactctatgacagatacaatgaggaggccaagaacagtttattgaccagtaagtatgctgatctttgtggcttaatccatgttgaactacggaattgtatggtcaacattttcataaactagcaaaataacttagctagagtaagtgataacgataaaaattttaaaaagaagcgcaagaaaaccccttaaatagacttctggttactccatttaaattaaatatattgatactggcgctcgcaatagattttacatgatcagaggcaaataagttattgcctcaatggtttggattggacaatttaatgtgttttgcaggttccacccatgcatacatggctggagaatcaaaaggcagaaggttatcaataaaaacatgcagtacatagttcaagataacaaaacattatgaagccaccaacaaattttagcagctagacagggcatattaactactccctcagtttccatttacatgtcactttggtcactttaaggtttcaaaatacttgtcactacacacttaccaatgtagttatttccattttgccctttgtgagtctaaaatgataattagttggcatatatatttagaagcttctagattatacatcccactcaagtaggagcccttttgtcatgttaccttgaacaagttgatttacatttggtttgtatgcatggtcacaagtgacaaataaataaaaacggaggtagtaaaatgtaagcctggaccaactcatgtactactagcaaagcgtagcaacaaacaattttgcacacagggttaagtaaaaatatgccattcatattctatgttagcaatccatctgaaataagatttggcatcagcaagctatcaatcaaacatcctaactggactgttccttgagtataaattggagcataacaacaaataacgacaagctcaccgttccctcaagcatttttagcagtgcttgttgaacaccttcacctgaaacatctctactaaggttgatgctttcagcctgcaagacactgcaacttcaaaaatccaaacaataaatatatgatgaattgaccctagctaaaatatcagtaccttctttgttattttatcaacttcgtcaatatagacaatcccttgctgagcagcagctacatcaaaatcagcagcctggggattcaaaagggaacaggaaaagtgctatcaatgaagagggtatagagtgctagcatcagcactggtagaaaggaatttcaaactcactgtcctagtttctgtaacaagcttaatgaaccacttaattcatctcctagaaagagcagttacgattaatctaagcttcctctatatagacatcatttagcaaatagccaattagaatcatctgtccttattaaagaagtcttgaacccaggtccaacacgaaagcccgaatagatagtagctagatgcttagatctcttaaacccaaaaaaaaaaaaacatcttcactctagatcataaagccaaaatgaattcatgtaataaattctatgcaaaggttattttatgatgtgctggagttaagaccacaatcttgatagttgcagttgtgaacatacacgcaggtatgcctagagttgggagcatgtggaacaatgaccacattaacatagaaacagtctgttagctaagtcacaacacacatgaaatctttcttagagaactaaaaggacataaatatcttatctgagtacatccagttctatggtcaataaaacacaaaatttagaattttcaggcaacggtgtcattacaacttttcttaattaccataactgccaacattaaaaaaatagtcatatccaaatttctatcttacaatttgcatttccccccagggtcagggcgaccttgtttaactcatttcaccctttttgtaccataagagcttgtgacttggaggcaaattcgaatgtcgaatatgggttgtctccactttgaaatatcatattgttatagtggctttcaagattttttatagttttgtttcaattcttcacatatttaggcactcagtagagaataagagggataaattatatgtcttaacagtttaacacttgcgctaatggtagaagaaaaatcataaggttctctaagcaactattgcaatacatgcaagtgaaaaggaaagactatataggccacaatgtcagtacacagaaattaaccataccgctaggagcttatacaggatagattcaacatcctcgccaacatatccagcctacaattggaaaaacatggttaaagaaaaggtgaactcctgagcaccagcatgagcacttattaaatcaagctgctatacgacgctctcaaacaaaagcattgcattttccagactacgattaagtactctattggtctatttaaaatatgccacctaagaacacagcacccataataaaaagtaatgttacagcaaaaagaatctttagaacacatgtatggctatgagtatactaagcactttatgcccaagaaagtaatgaaaacgtgtacaatacaataattacataaaagagtataaagcacatatcatatatacatggatccaactggtaccataattttgggaaatcttatgatattgctcccccttacagtaaagccaggaatggataaaaattggatgctatatcaggagaagaggaaaaatgcaaaagttaatgaattgataaattaagataattcatctaacctgagtgagggttgttgcatcagctataacaaatggcacattcacaaaccttgcaagggtttttgccagcaatgttttccctgactttgggaaaagattttagaatcatataagtaaaacattcatttgataagaaataaataatatctaccatcatcttattcgttgaatagaaaatggtctacatgagagagataaagtacagatgtaatactattgcatggtctgtaaaagaaagaagtgatgattcaaatgaaaaaccaaccatcaactagtgctatattaagaagtttccaaatgcggtctcatgtgctggcacctggcaatttggtgtgatcggaagtgtttctacaatatattaaagtttataccatatcattattaataatatgcatgcctactattgatcataaaaaatactagtattcatttagacaagaatatttttatagtgcacacgagttctccattgagacaatttttcattatgtgttacaaatattgcagcatacagcactaatagattgaatgattggagcatgtacccgagcctgtcggacccatcacaaggatgttgcttttctcaagctccactccatcagtatcactcgcgcaagaatcagtctcgctacaatctccagcagacctacagtttgaatccaatttaccacctgaaactacccatacgcaggacgcagcaagtctggcaaaactggtatttacacaacaccaacctgctggagagtaactcgcagtgtatccttttatagtggttataaactgctacagacagtacctgccaaaagacaaaaacaagtttattgtttcgatttaccggacaaaagcacataagagtcactacaatcgcataagtgtaaggctataagcagcgacgacgtaaacctctagcctacaaaactagaataagaaatcccattaggcacaaactacacccacccatacactatcaacactgttttgcagtaccaagtgaggctgaatccctaatccaaattaagacaactccactcagagtggaacgcacagagaaacagcataaatagttcaccttcttggcgcgctcctggccgatgacgaacttatcgagcccacggcaaatctccttgggcgtggggaaccgtcgccccaggttggagccgccccaccccgcaccaccaccacccccctcgttcccatcagacccatccccaccaccaccaccaccccccgccgcaaccctaaccacatcgatcctccccacctccgccccgcgcgcgccgccgccgggcggcgcctccccgggctgccgccagatctccggcggctccccgcccccatccgacccgccgccgacccctctctcggcgaccgcaccccgcaacgggggcgccgcgacggcccgcggcaacgacgcctgctgctgctgctgctggtggcgcctgcggaagtacgcccaggggcggcgcaggccggggccctggccctgctcctcggccaccgcgcggcccgcgtggatgcggcgggccgcggtggccgcgacggcggcggcgcgggagcggacggcggcggcggacatggtggggaggaggaggtgggggtttcgtgcggggaagagaagccgggggtgcgtaggaaatatctgtggatttttgggggaggtcgccgtccgccctggagagtagcggagtgtttcttgcttgtgggggcgggttggtacggtacctatccttttccgcggctgcttcggcgaacgccaacgagatgcctagagagagaagaaggaaaacgtattgtagctttgctatgtgatgatcatactcctcgctccttatcatcaccattgaccaaatcacaaaatgatactccctccgtcccataatataagagattttgagtttttgtttatagtgtttgaccacttatcttattaaaaaaaaattgaaattattatttacttttttgtgacttactttattatccaaagtactttacacacaatttttcattttttatatttatataaattttttgaataagacgattggtcaaacactgcaagcacaaattcaaaatctcttatactgtgggacggagggagtaactattagtttgaactagctcagtgtaaagattaagtgatggatacgtaaaatgaaaaagtcactggtgtatagatatttgagttttagttattttaatcttagaaaataaatgtatttgatattttacggcaactactatatagaaagtttttatgcgaaacacaccgtttatcggtttgaaaacatgctaacagaaattgaggtaaaattgtattttaattagaaaagaaaagggcagtgcgctaatggtagtactagattattattatttttttacggggagtagtactagattattgattaggagggaatcgaagtaccctacaacccgccgttcttttcaatctactccttgcaatttaatttgctgcaaaagactagtcacaagtttatttcatcttttaattatccacctctatctatttttagccatttctcatatcccatgagcctccatagtagtgaacgatgttgctagttgccaccaaaggtgtgtaactcaacctccttgcatactttaattctaccaacgttgtagcagtaaacacacgacaattatcacatactatgaaaaaaggtgcatcaaatctcatgctcaatagaagacataaggagtaacgtcactcaccatactgggatctatatgatgcgagaaatcactgagtgtgatgaaaaaaattagcgaaaactgagttagaagaaaaaaatagacatgtaaagagtgtttatgaaattaagttgcaggggaagattaaaaagaccagtaggcagttatttggatttcccttattgattattagtagggtgtactccccccgtcccattttaagtgtagtcatggttttccgcgtccaactttgatcgttcgtcttatttaaaaaaaataattaaaagcataagtcacgagtaaagtactattcatgttttattatctcataacaacaaatactaattataaaaaaaatttaaataagacggacgatcaaagtttaacgtgaaaactcatggttgcacttaaaatgggacggatggagtatataatagtgggttacgatgaaacttggtgtattaaaaatgaatcacacccgtcttgcctttgaacttggtaggagtattgccctgataatttatagaatgattagatttatgactcattttgaaatgaaggattgaaaaaaatagaggaatggaaaaaaaatacaagatttgatagaaatgtatgagtgcaaaacaaagcagcgcaaaacataaggaaatatacatgaattgtcgtttgaatagacagtaagaaaaacacataaattcgattagagatatagcctcaaatgaaatatttttaaggggttaaaactctcgctaacttttctctaaaatatttataggattatctatttcatagaaatttcaaaagaagggataagatcctatgtttcaaaggcatttctagatttgtttcttataatattaaagtcatccaagtttcctatattttttctacaaattaaacggggctttagaggagaaaagaagagtttgtatggggtcttatccttagctccaaaatagtcagtatattgtttgtaagcacacgattaaaaaggaccaacgctaagttcgaattcttgatcttattaaattaatcaaaagttatcagttagatctttacctgcaaactaaatttgagtataactctaaataaccacggataaatctaactacagttttctttcataaagcaacgacatgtgtgattgtgttgaaagtttctttatctgaaaatagtgaaagcttccatttctacatcatagatggcccacatgaattcttctagactttaatctgtttgttataggactacacctttgaggcacacatcaaatgaaatcatccgtggcagagaagtccactccatttttttctcattcgctcgaaactacttcctccctccttaaaaaaaataaaaaaaaagacaaaccctgatttccgtgttcaacgtttgaccgtccgtcttatttgaaaaaattatgaaaaaaattaaaaagataagtcacgcataaagtattaatcatgttttatcatctaacaacaatgaaaatactaattataaaaaaaattcatataagacggacagtcaaacgttgatacgagacccacaatttgtctttttagagggagggagtattttagccagtagcatcacatcgtaacccggctttcctctttactggcttgtcacattctctagcttttgccaagttgagaatccttgtatgtaccgtacatagaaggatattagccatccgttttgaggaggtaagcaattggtgggatagagtatttaatttgcctgtgtccatggtactacatggcactatctatgacgtggtaatctctttttctaaagtagagttaggtaagtttgcaatggtaaaatattgttaaatttgttacctaactaaatttgcaattactaaatttcgataagatctaatttagcaataaagtgaacgccccaaatattactttctattacctagaacacaccaacagatacactcgcacgtataaaaatgtgtccctgattttgtggttgttgcactaggctacggtgtgtttgagagaagagaagaaagcagaaaaatgagaagataccactaacatatgattaattaagtattaattattttaaacttaaaaaatatatctatatgatttttaaaacattttctatggaaatattttggaaaaaaacacatacttttgtgtttttcctgccgaatgcaggctacacctagcataagtcgatgtactgttcctatattttattctttaaaataaccaacatcgatcacttcatcacgagataaaaggttaaagagcagggcttacgtatacttagaaaaattattacaaaacagttgctaataaagttgatctcaaacctttaattaattagttaatacttccgttctcatatttaactttgatcattcgtcttctttcaaataaaattggaatacttaaatagatatcatagtatcaaaaagtattacatactaataaacattaagaattaaaccacttattgtaatcaaattatttttaagagttataagtggtcaaagttgaaacaatatcgatcaataaacatatgatagaacttataaaaatcatattcatccacatcaatatttatgaaaagtttgtagctattttactttacatgtaagagtattagctttttctgacggtgagaaattggcttgtgggaatctgccaacttctgagttctaattaattttctatatttttctcagaatttaactgataatttaaactatgtagggaaacttgagattttaggagaacctccagtgtatggttaaaatcaaaccgtgcataaaaaaaatcgaacagaccatgctgtgaaagtcggctggtaagtgtccggaggaaaacatgttctttaaagagaagccgaacacaaccagttaaaaaaatatttgttgcgcacggctatcagactgtgattcttttttcgcatgggtcccacaatcgatttttacactgtgatggttaaagagaacttttgttcggctttcatggaagtgctagtcgaactaaacactataggtgccctaacagaaggtgaagctgttagagccgatataataggatgttttagcggcgatactgtatgtatcctaccaaatatgctgagttggctgagaattagcagagagagaaagagagtgtgtgtgagccggcgactaatttgtcgctgactacacacacgctccaagacaatggatgcagcaccatgactgcttctactggaacacgcaagcaagcacatgggcgatttcgatgttcgacggcaaaaggggcggagcgacgggcgaaatgatgcagcgggaggaaagctcgatggcgacgcgattgagagctaacagagaagtgagttcgttggcggcaatgccgacggaagccgggaggtcgaggatagggacagctttgttggcgatgacgccgacgaaagccgcgagcccgagtacggcaacaacgttggtgacgcgagtggcgacgggagctatgagcttgagggcgatgaccagagggacgatagttctacgttctccatgctccatggagcaagcggctcaatgcagctgcctgttgtcccaccccgcccgcactccacgcttttgctacgattcgctcgctggcagtcatctagccatggcaccagctctatgtccatccatctttgctagctgcttgcaacctgcatatctccataacaatagatagatcaaataagaggtggaaactagaaagggagttgtagcaagctagaagatggattggacatgaagatcgatgggaactgtgtacggttagggcagtagcagtgcgtcccacaaaagtgaggagcccatatgtccacataggagaaaaccccggaaaaaggagtcgaagcacctctcttcacagtgcgggcacgcgtagtgtagctttaggtggaccccatcaatttattttcctgaggccgaccccaccacgacgtttctcttcatcttcccggatcaatctctcctgcaccaaaccaacctccgctccttcccctctctctcttcctctccctccctgaactggcacatgacatcaactcccctccccctactctcctcgtcagggtggaatttgtggacgtgggtgcctccctccccctaccgtgacggacacttggcgacgacgaacttggcgctccgggtggctcaaatcgagagccggcgtgggcggcgaggtccgggtggctcggatcaaggggcggcgcggccaacgagctccaggcggctcagatcaagaggcgcggccaacgagctctccggccccacgccgcttttcctccgccgcaccatttctccctcctccccatccgacggcgcatcgatgcagacagagctggacgggagcaatgattctagcgcgggaacaaagatgcagagcgagggagcagaggattgaagctacgacctccacagcgcagacgcgaggtgattccctgtgtcacgcgtcctcctttcgacgagaaaactcattgcccagatagggggtgggcgactaaacagagtaccatgcttcgtcaccacatatgcgcgggtccgacgtggtgtgcgagataacgctccagctcaccacactgtaaaaggccttagaagaatactccatccgtttcagattataagacattttgactttgttcaaagttaaactattttaagtttgacgaagtttatagacaaatacagtaatatttaaaataccaaattagtttcattaaatcaataattgaatatgttttcataataatttgtcttaggttgaaaatgttatttttttctacaaatttaatttaatttaaagcaatttgactttagttaaagtcaaaatgtcttataaatgtaacagagggagtatatgcttactatatgaactagcaaaatgtccgtgcttcgctacggtattaaccaaagttattttcacactgttttggtactttttcttgctagaaaaagtctcaaatgatatagagaaatatagtagctcataataaattattgaatgtttgcttgctataaaaaatctcaaatgatacatagaaatatagtagctcataataaattattattcaatagtgcgttgcaacgggaaaaaactaatgttattaagttagtaaatttatagaaaaaagagcatccacgttagctcttatggtctagaaattctcatattaattggagtaaaatataaaaaataaggagaacttattgtagacaaggactctttcattttttttaaaaaaaatcgcgttgtccaatcataaataatattggatgaggagtctagaatattctccaaaagcgcctagagtgcatataggaatacaatttagaaaaaaaaaattaaaattcaaaataaaaaatattgaaagaagagtttaaagtccatatagaaaactaattagaacaataaaaaataggaatattggaagaagaatagagttcatatagaattaaaaataattgaaattatttaattttagtctaaatttaaattctatatcatgagaaataaataattgcatttttagttgaaaaataaatagaaaaatctagccaaatttttagtttattgaatttagttggaattaaattaataagcagtcataaacaattaaaatggtattaatgctatttcttaaaatagaaagatgcttaaaattactgagagagaaaacattgattttaattgtgggctatttggaggcccaataatgcggaggcccaatagtccggtggtccgatgcgggagaagccggagtcgttctatcgaatggactgtccagattgaaccaatataaatatatgcagcaaaaccctaaccctaaaattcttcccccctccccacttccaatctcctttctctctctctatctctctctctctcttgatcgaaaacttacggcaacagcggtgacctccgccaccgaacagcgacggcggcgccctcctcccccccacccacgagcggctgcggtgcgctcttccctccttcccacgagcggcggaggcggcggctccctctgtcccgtctcgcctccctcgccggcagccgctccctccgccctgtctcgcctccctcgcccctcctcctctccatctcgcctccctcctgtggtggatacggcggtgatggcggcgggttggcagtggccgcgagcggattcgagggtggtggcggcggatccctccaccccctctagcctccctcccgtggcatatccgccggcgatggccgcgggcggatccagcggtggcggctccctccccctacccgccttcctcctgcggcagatccggtgtcggtggcgtccgtggtcggataaggagcggcggctccctccgccgcaactcttctccctccggcgacggtagcggggttggcggcggccgaagatggatccggcggcggtggcaacggccgagggcggatccggcggcaggcgagtgaagttttgtgatgtatattgttgttcttctttttgatgtatatttttgtgaagttttgtgatgtattttgtgatgagtgtggttgattttttttttgcaaagagtggttgagttttggttgtgccgattttgggaagtgtttccatgtttctgattctaagagcgattgggattcgggggctacgaaggcgcaccgccgacggacgaagacaccttcgtccgtcttgtgatgaacggaaaattacgaatattttaattagttaagatatactccctccgtttctaaatatttaacaccgttgactttttagcacatatttgaccgttcgtcttattaaaaacttttgtaaaatatgtaaaactataagtatacatataaatatatttaaaaatgaatcaaatgatagaaaaaaatgcgtcagatatttagaaatggagggactatatacacagcaagcagactgcagaagcagaggagacgtgtgtagatccctctccctgatggcttcatcaaagtccgtgtgtaggccgccctggacaaaacggagtccgcgacgtgcgtggcccacgcgacgttccacctgggcctcgatctgtatgtgtgggccttcatatgttgagcccattaatttgtttttgcttgggctcagttgcctgaagaacactcggatgaatcggagagcgcacgaggaaaaattagcgcgattaatgacggacgaaagcacgcaatcacagatgtgacgaaaggaattatatgaatcatttaatttaattagttaaaattggtagtttttaacgctacctataataagctgatgtgccaatcttggagccagttgcactatctcgctcttaaaaccgagcggccgagcgtaaactagcctcaaacaaaccgacctggacacgtcgacacgatcacatggtccatcatcctgggcccacaagtcatagagccaacgaacttcaattcagccatccccaacaaatcgcatcgttactcctcttcctctgcctgccgcccccaatcgccggcgatgccgcgccccgccgcctcctcctccagccgccctccgccggaaggcgagccggcctcgagccgcgcgacctcctctgcggagtcctccatcgcgtccctcatcgaccgcgccacctccaccacctccccctccgtcgacccggccctcctccgcgccatcaagtccgccgcccgcgcctccgacggcgccatccgcgacgccttccggatcctcctctccctcatgtccaagccccacgcccacgtgagtaagctcctccctgctggtttgattcccttgccgaattcgcccaaaccctaactcgcccaatcttcaggtgcggctgctcgcgttcatcatcgccgacgagctcttcatgcgctcgaagctcttccgctccctgctgaccgacgtgctggacggcttcctcccgctcgccgtcggcttccgccgcgcccacccgctcccgccgcccgctgcctccgcgaccctgctccgcaaggccgccgtccaggcgctcgagcgctggcaccacctgttcggcgcgcactaccgccagctccgcctcgccgtcgagtacctcaaggagtccgcccgggtccagttccccggcctccgtgccgccgtcgaggctcgtgccgcgcgggaggctcgcacgcaggagatcttaactgcaaaggtcgagcagttgcgccgaaacctggcagcgattaaggctgaaatccgctccgcgattgatgagatccgcaatgggttggatatcattcgcatcgagagtgaaaaatttaacaattatgcaaatgatgaggatgaggagcaggagattgcctctttggcgatgcggagtattaggatggcttctttgatggctggggagtgggttcctgagactcaggagaatgaagcagttttcgacgcgttgagggagtcatatcggctccttgtgtcaaagcatttggtcacagttcaggaatggatatctgtgctggttagggtcaatctcgcagataatcgtttcagagattctgctttgaaggaattcattgatgttaagaatgaaatacgagcggtgagaaatcggtgtagtgagcttggtcttaatcttgacaatgtccataggcggaagggtgttcaggaggaagaggatgatgacttttgggttgaggggaatattgaggttcctagccctggtagagtaggtaccagtgcagatgttgcaagtagcagcaaggacactagaaagggaaagaagccagtaggtggcacggatactgatgatggcaaggcacctaatgctggcaatagtcctcaagagctggatccagagagggcaaagctgcatgcagaagcccctgtgctgccatggagctctgttttggatcgttggggttctaacagggatgcacttgtaaaccaaaggggacttgagctcgagagccattggggaagggtggataatgatgctgttatacctgctgcaaagattgcagaattaaatgttcatagttcaatatatagagaagatccagttgagattctaccatgccttgcacctctgaagaaaggaggcctttgccagagaagagatctcaagatatgcccgtttcatgggcctattgttccacgagatgccgaaggaaatccaattcatcagagtgatggccattgtgatgcagaaggaaatccagttgggcagactgatggccattatgatgcagcagtaagtcctattgatccgaatgaagacagttctgatgtaagagaaaatatgattatgccagatggaagcagtgatggtgaatgtatttatgagtcctctccttcaagaacggcaaacataaataatgacattagcgacagcgatgtaggtcatgacctcggtaaaattacagtggagcagttggcgagacaggcagtgcagaatgtccggaaaagagacagggatgacaaaaaagctctggaaaaagcccaacgagcgagaattcgtcagcataatcaagatgttttgcgggaagcggctcttgcttcaacctcgcgctcagcggcagactatgacctcccttcgccagcagtgtctcgacggggacgccgaggtaagacaaagggaccaacactggcatcgatgctgaagaagaaagttacttccaaagatagaattgcagagaggcttctgaatgctcgagctagggatgcgacaataagagaagtttcacatactgaagatatgagctacagagaagcattcccaaatcaatggtagtataagaagcctaatttttgctgaataggttggtgaatcgtcatgataagagtgaatcaataattctttctgtgcgcagttttcagttaaccacatgtcttcttgagttgcccagatacaagtaaaattgtaggttttcattgtgaagtttagtttttgtacagtacagtagattgaataagtttcttttatttcttttgcatgttcattttccctttgtaaacatgtatatgtaccactccatacttgctggattaataactatatacgctgaggctgcagttcaaattgtgttattttatctgagtaatattgtggattaattaatattgcggttttatatggttcaagacttcaagttgctggtgcaactcgtgacctcaggttttacagaaaaaacaaggaacgaccgttgttgcataatagatgtaacatgttattttcacccatacatgttagcatatattcgctacttcctctcatagaaatacgatttgttgtactagattgtgttatattcttacttaaattgtttttttttttggacggaggaagaacagaaaaccgtttggaaagattagaaagcgctcttctgatcaatcagcacacctatctctaaaagcatacagagagtaattccactccacagtgcacttatgcctcgaatggaacagcgcaaagcaacgatgaacctctgcacatactcactccgcttcataatgtaaaactttctagcattgcccatgttcttatttgacacatatatataacatagttgctaacacattgcacaatgttattatttttcacacattactaacctaattagtacatagttatatacacattcacttacagaaatacacatatacacagttgctaagtacatcacatggttcagatcgataaacagaaattacctgtgttcagaacgattagaaacgctcttatctgaaccaggcacacgtaaccaaagctaagaacttgcagagatttccattccagagagccgcttatgcctcgaatggaatttaacaaacacaaatctagcaaaagcaatatacacctgcacatcatcatcacatacacaaattaacctaccaaactggacacacacacacacacacacacacacacacacacacacacacacacacacacacatatatatatatatatatatatatatatatatatatatatatatatatatatatatatatatatatctatctatgtaaccccagattcaaatccaacgtctcgttcgagccgccgtcttggaggttcttacgcgccaatggaggcggcaggttcaggttgaggtccagcgcggtggcggcggtcgccggcgccggcggaggtgatgccgacgtggtagtggtactactgctgccggcggtggagacggcgagcatcgatatcgcctgatcggcacaggaacgatccggccagtggcaccgcttgtggccgccgagcgcctggccggtggcgaacccgcggtggcagacggcgcacttgtggtcggcgcaggttgccggggaatgatgaggagcagcggcggcggcgggggcgagaaggcgcttcttgcccttgcccttgccggcgccggagcgggcggggtgagcgccggacagcatgaggaggctggcggcgacctcgcgctccctgagcgtgaactggctggcggcggtagacgacgccgcgcctgcgccgccaccgccagggggcgtgatcccgcgccagtggcgctcggggtggcagcgcatgtggccgaacagcgccttccacgagaggaactgcctgccgcactcggtgcacggcggcgcgtccccggtcggcgacgagcacttggcccgcgccaccatggcctgcagcgggcgagcggcggcgggcggcgcgagcgacagcgtgagcgtggtgtcgtcatggcgcggcggcggcggcatcggatcacacggcagcgcgggcggaggtgacggcggggcaggaggtggaggcggcgagtgctgctgcgccatggtgggctgggagcgcgagaggagaggagaggaggtttgggtttgggagtggaagttttggaggtggtggtggggagggagggacagtgcgtgtgctcgtggaggttaatgcgggcggggagagcgggaggaaggaaggagaaaccgctacttgccctcagcctctggcctctgctgctgtgtaactgtgttgtgactcacatgctcgtttagatcaggctgtgtttatttcacactaaaattggagtagaagtttggttgaaattggaacgatgtgatgaaaaagttagaagtttgtgtgtgtaggaaagttttgaagtgatgaaaaagttgaaagtttgaagaaaaattttgcaactaaacacggccttagtactccctccctttattcgttttgattttgattaaaatcaaattgctttaaatttaattaagtttgtattaaaaaaataaatgttttcatcccaaaatatatttaattactagaaaaaatacccgtgcgttgcaacgggtgaatgctattttagtcttattattgttatacggtttagctatgatgaaatttaatgtgggaatttgcttgtatattcttttttaagaaaatcatgagctacaattagaagtccgactttcatctcaagttttatgtaagtttttttaaaagaatatttccaaaagcaaatgaagttaaaatccaactcatacacgaatcttaaaccgtatgaaccgttggatctgcatttccaaaagcaaacgaacttaaaaaatcaactcaaatacggatgacataccaaaaagtaaaacctcttcaatttttataatagtagagatagctttaataaaacaaaaagtaaattgcatcgtcggtacacaaacttgtcaggtgggtgcaatctagtacacaaacttgtaaaattctcgtctttgtgcatgaacttgtctattgcgtgcggaggaaggcgaaaaagacactatatggataatcttattgatttagggcatatatttgagaaggttgctattagagatgtacctcttcaataaaaaaaatagaataggatatagtgatagcagaaaaagattaaaagacgagcaatgatataaatgttagaaatatatgaaattcatcatttccatgatgaaggatacaatatagaccaaatttataaatattgaatgtcttatgcatactcactacacgtatgcacgtcacatcctaatcaacgtcaacttcgtaaaattaacattgccaacatattttggtcctcattcgcacaaactagacaagtttatatactgaaacgagcattttacaagtttatgtactgaattgcacccaccaaaatagtttgtgtaccaccaatacaatttactcaaatttagatcaaaatcaaaacgactttgtaatccgaaacagatggttgtaatctgaaacggattgagtaatacctaatcagcctaaaaggctggggggccggcccttcagattcttctctcgtgatgggccgtagtaggcctgatgggacacatgcccaatcttttcggataggcccaatctgatttgtatctttttggttaatttttttcagtttatcacttgatgaattcataaatcagaaggttaaattggatccgtgaaaagaagaaaacaaaagtgaaagcgaatgtatttttgtagtcgaaaatcgtttctatatttgcatatcaaatttgggttgcgtgttcatggagggacaccggacacgcgatgaaatcatctgcgcatcctgtactttcaatttttcctgtgtcatccaataaaaaaaactaattcaaacaaggaaaaccaagtgttgaaacatggtaaatgatttaccgttggatcgaccgatcccgttctctcacttcaacagccatatatattatattaggcccatccacgaacaaatcgaaccgtcgaagtgactctgtagccccgtaactggaaatgaattcatattcagatttgctagtcctcacggccgcacgctctcgcatcctcgcgtttcatcctcctgtccgtgctgtggatggactcaatgtttttgttcattgtttctcggtaaaatttctgcaattttgtttgagaattcaaattttgtttgaaaattttcgtgatttcgctgacccccgaaatttttcccatttccgataggttgaaccattttgatcttcaagactccaactcgtactcggtttgtagcccatctccgactcggattacacgtaggcgcgcgcctatttatagctgctgccctgcccgtctccttactccattagcttgctagcgcgcggcacaagagcagtaagcgaggcgcgcatggcggcgcgcgccggcgacaccggcctgagcaaggtcaggcgctactggcccgggagggcgccggactgggcgtgggcgggcgccgctgtcgctcacgacgaggacgacgcacgtctcgtctcgacgcttgacgagatcaagcacgtggaggaggaggcgctgaggtcgccgcgccgccgccgccgccgtgtacggcagcctcccgagatcgtctcggcggcgccggcggttgactgctggcatgagcccgatcagatcgaggaggaagaagaagatgacgatgatgcccgggaggagcgcagagcgaggataagggagagggcgctgctcctgaggcagcatgaggaggagcagcttcttcttcatcatcatcaccagcggcatcaggaggatgaggcggcgtctgagtccgacgagacggcggcggaatcggactcggacgacgagcagatggccgtcgtctacatggccgcgcccctgttcgtccccaagtcacagcgcgacaccatccggctcagggaggaagaacagcatcggcagcgccggcggcttgagctggagctggacaagaagaggctcgaggacaggaaggctcagacgaggcggatcctgctccaagagatcatcaaagaagagctcctcgccgccaccacagcttcggccgaagccgaagccgccatcgacggcgtggacaccgacgacgaggtggaccaagccgaggagcacgagtcgtggcggcgccgggaggcggcgagggtcaagaggagcagggaggagagcggcatcgacgagaacccggtcgctgatgatcgtcccaagaagatgacgatcaagaagcagatgaggttcatgcggaggtactaccacaagggttgcttcttccaagacgacgccgacggcgcggcgcagacggccgccggagcatgcgaaatctaccggcgagatttctccgggccgactgggttggacaagatggacgtgagcgtcttgcccaaggtgatgcaggttaagcactttgggcggcgtgggggaagaaagtggacgcatctagttaacgaggacaccacgtacaggaactatagctagcctagagtagactgattttaaggttccttagaagatgggtactccctccgtttcacatctattcattaacatcaatacgaaagtgggaaatgttaaaataacttacattgtgaaacggagtaagtagtatttatccccacaattttgtgaagatgtgagcagtggcaagtttgttttttttctttgctccttgcagtgtaaattgttttggcttgtctatgctttgtattgcatttgcattcataaatcaaacatgaaaagttggtatatctaagcaatgttcagaataataagaactactccagtagtaaaaaatttctagttaacctagatatctcacttgaacttatcactaagtttactaccttaattaaattggtcacaatggtcagatttaaattaaattaaattaaacagcagctgcacataattttcagtgttaaaccttttatagtagtgcataaattgcagtacccaccaaagaaaaaaacataggattgaacaacattggttcaaagggagtgttcacctaagatagttgcgctatctctagcgagttttcctaaccgtagttgctacaaaccaatccttcacttcaaacaatccgttgattgcctcattttactcgtagtattatcatcagaggcacaagtcctcccaggtgtgtatattgggaattgaagcaaacttgacagtaaattgtaaaacacgaacgaattctatggcaagaaaaaaaatatcattcagaatttcatatgagccctaaaacacgtgtagcaggtttgcagagtgacagaacagaagggtaaaatttccagtactaatttcccgttaagagaagcttgattgcttcatctgtgcctccccacttttgcacgcaggttgaaacacgtgtggcctgcaaatggcagaatgaagatgagcgaggtttagatttaggtgcccacgaaaactaggcaggtcgaaacaaattagtaacagagtatggtattgaccattcacttacaaaactgaaaaaagttcgatgacaaagtaatttacatttaatttataaccatagtataaatgctttgcaatgtaatacctggtggcagtgacatgattttgcagtgtcctagataaaagtcacgaaactagagtgctcggttgcaattttttttggcctaaaagtatctatgtacgaggatcctgagacattttgatttaatgactaactaaaagcaaaggtattatgacagtgtttcacttccaggactaactgagctatctgttttatttccatatccgagttatctgtttttcatttttgtatccaaagaaaaataaaaattgaaattgtgacaaaaaaaaaaactaagcaatctgttttatttccatatccaagctatctgcttttctatgtgtaagtgcagactataccaggattcacaattttcgaatgccaaaagaaaaaaaatcagggcactgaaattcagaaatttcaggggggaaatgtaactttgcaaactgaaaattttaaattttggatagattttcactgaatttgaatttataaattcaaacaaattcaatttttttgggcagaggcacctcctgtcaagtgtcaagatccacctgtagactagaatctttgagctgaaaatgtaaacattagatttacctgacaccacaggctgcacactgttgagcaccatggtcaaaccaagaagccctgcaatcttggcaacggcctgccacagcttcacatcgctggtgagtagtgaatatgatggagaagtgatctccgagaatcaacacgacagccatgcaaagcagccaatcatcagcgactcaatgacggcaacaatgacatcgaacatgacagctcttggacaaccggaacctaagctcattggagactcgggtactgaaacaaatggcaattatcaaggttaaatgaaaagctttggtattataagttcatcaagtcttttgtttcaaagaaaataaattacaccgattcttgaagacactttctagttaagaacattgaatcatcaagtagaaacaaattatagtatatgtagataagagcaagagtctgcagccaaggaagacgtagcaaaaaacgttcatagctcaaataatgcagcagtataatcaagaaccttaaaaataatagaaggttaaagagtcaaacctgcgggcagcctggcaccaaatactgttagatttccttcaaatattatattgtcaacatgtaaccttaaaaatacttaggtaatattaattctgttagtatgtaaccatatattataaacataaaaaagaaatgccacataacaaggtagtattgaatatcgcaaaatggtaacctttttaaatgaaaaattactttaaatcctgtaatcagtaatatggtattataaaagccataatccaagaacaagactagaatccactttactccagactgaatcaagatataagataaatttaagctgcaggtgtcaacactcaatagttaatcaatgcatacacataagaatcaccaaatggtccctcaatttcatgagatcgaaattgcctcctcaaatatgaaagcggaaaaacgttagcctctagagcatcaattaacaggttcatttcagcccgtatactgagctgctctgacaccatagtgctgaccctgtacagtgagttttcttgctcagcactgttagaagtccaattgccatccaagcaatttactcgatggatagtgatcatctatagaaattttggaataatcagtgttgatgattgtgattaaattgcttggagtagcaattcagtcttcttgctatgtgtgattcaggaaaacagtgaccacactaactcagagtgccatggtgccctgtcaaatcagtaatggataaaacgagccaaatttggaactttgaggactactttggacattttagtagttggtggaccaatttgagtctagtgcgaatgttcagggatccttttcgtgcaataagcataaatacaaattgattgataaacatgacaattgcatgtgctttacgtgaactctttgttgccaattcttaactttatttacaaatagtatatggaatttaggaaataacatagcactgtggcgcctgtgccttggccttggtgcacgcatcctcagggctcctcttagaacttggaaaattttaaactattaagtatgtggttgtgaattggttttgcacaatgtcttaaattctttagtaattcaggcatattacattctgaatactctgataacttccaagatttaggagcaaactgaaactcaacttattatggaacacttctattaaataataagagttcaaaggtgatgaatgccattgccatagactgagtgcaaatcacctcatctagaaaaaatgtttatgtcattcctttttaaggagatattcatgttgtaatagtacagaattctagtgcagtcctatggagacctgtaccaaggaaacatgcttggaatcctagcattaaattgtgcaaccacacctgatgttacagaaagtgcaaatgacagtaacttgcacagatacacagaaacaaaaaagtaaaaatgataataaaaaaggtatgttttggtggcaaaatcagtgttctaaaagtaggtgataggtgaccattaggcactaggcaccgggtagcatgattaggcattagatggtgcattaggcagctgaactactttgggtggtgtttggttgctattttagtgttacatagtatacttttatgtaatatgcttgctaatttcttggatttgactagttgatgacctaggcaccgcctaggcgtcaattagacattaggcgccacccagccgctgagccgcctgactaaagcccaccaccttcttgagccatggggaaatgtttactgtccagatttatttctgaacaaagagattctcataacagttcaccggttccaatctattcagataaaacaatgcatcgtgcgtataccaaaaatatgcatttatcctattgacttctcacaataatcaggtaagagatgtcttgaaatacagatatgtacaagctgttatctagttctccagcagccctgctccagttaatttattgtatctccaccaagcatgagagttttttttcccttgtaacaaagtcatgacaatgatgactaacaaaaatgcgagtgagtttctctagtgatttagatatgctgatgccaaaatattttttgttgtggtgattgtaacagacagtaaagcatcaaaatctgacaaattaactatcatttctagctaaagtccctcaagaatggacatttatataggtgaaccatattagtgcattgttccctactagctacataaatgggattttaacttcacatcgattgttccactagtgcttgagggtgggatgcaaattttgcctatcatcattgaaacagtagcataggctgggattacgtatttttagaaaagacatgcgacttatgattatggcattgaaaagaagacctttggtttaaacagtatgggcaatcatgaggtaaatcaacttggatatcaaacttttcatcaattttattttgtacaattacctcactacagaagtagcagaatcatcatatatcatcacttgattatgcaaatcatctcgagggaaaccttgtcgaatcactctggttcatgtgttttgatcaatgctgggaagattggtggccaaaccatcatgaaggggtatatctcaaatagaaaatcatccttcattgccatctcatacaccttctccactgtcctgctgataatatccatgcaaaagacctcaccatccacctccaagaacacaaactcagcgttgtccccagacccaggcagactaatgcgtgaatcccctgactcccaactaggcttcacaagatgaccaaacacctcgcgcaaacaaatagtatttactagattccaatcggcagagctgtttccatctgttccgtgaagccaaacatggatcttaaacccctccacatggatcagataaagcccagatttctccgcttgcgacagcttaacgctcagctgaaagctttcagggcagtcatctcgcacggcatcggggacctcgatgaagaacaagctcatggacaccaattccaatccaagaatgtaccctgttgtgcccaacatatacagcttgccattgacaagaaaaccccggctcaatgatctcctccagtgcgccggtagctcaatgggcgccgaggtttgcgcgacgtcccagaccccagctcgcaagatcttctccaccttggcgaagacctcccgctcgctgctcaccagggtcaccacggtgcacgccacggcatcgccatcgccatcgccaccgtcctcggggaggaggatataccgcgtgtggcgctggttgggcgggagagggcgaggcggcgtgcggaaggtggagatgaccgccccgtcgctcgccggatggagcgggcggcggagctggagcgtggactcgccgccgcccctgtggcacacgaggaggcggccgttccggcagcagtagatccccgtgccgaggtggaagtggaggtcggcggcggtgcccaggtcgaagctgccgcggcggacgacggcggcgagctcgggcgggtgggggaggggcacgaagcgcgggcgcgggaggctggcgctgtcgacgtaaaagccgaggaggcggggcgggtggaggacggcgaagcggcggaggaaggcccggtcggaggcgtggcggagccagcgcctgcagacgagcgcggcgcggacgaggaaggtggggtgggcgaggcggaggaggatctcgcggaggaggtccccgtcgtcgagcaccgaggaggaggaggaggaggcggcggaggaggccaccggcggcggcggcgacggctggggagggcgcgggcgcttgcgatccatgtggacgcggttttgggtggatcgtggggtaattaccaacaaatggagacttgggagacctcccgttcatttggggatgtaaatcgaaatcttgatttgtcctttcgatggaaaatccatcatcatttaccccatccagagtgctaaggttagtctattcggagcattgcggtaccaaataaaagtattttactttgttctaaaataaaaaaaaagaagtaaaataattatttttccttagagattgctattatatgatatctcatcccaggtcggtatggtaccatctgggtactgaagttatgtatgttatggtatagtgtcattaccagacctgatttgaaagagggagagatcgactctccaactcggtggctaccctcctatccgacgacagcgtctccctacctacctgtagccaccatcgtcaaatccagccaagcctagatcatcgaagtcgagtctaggctaagacagacaacgacgagatctggcatccttgagtttgggacgtaccaaattcggtggctagaaagtttgggttgtagatccatcacggattggcaacagagagggcgtgatgttaggggcttcggccaccttcgggatgtgcaggggcccaggtggagtggagctttgagacggcaacgcagttcactgatcggctaagaagccatggcacacacaggtctagtcaagtttaccttcccacaacacacacgcagcactaaggttcctgtggcaactgaactaggattcaaagccaggatgagtggatctaccactccaagccctttcctattcttatactaatatatgtaagttccttgcatttagaactagaacgtgaggcatagtaatggcgcatgtgtgatattttattgatcatatttaggctgctttaggaaagcagtcaagcgggaatggaaaaaatgtcttctactgctatcttatgtgctaaaatggaaaaaatcttctcttcttctctatgtcactcatcacagtcggagagacccatgagactttcttttctcccggtaggctctagcgctacaatgcttatggctgcaatccaaatagcaatggtcctcgcggatttatgtgcacccaatccattaaggattcctggtagtgagattcctctagtcaagtctaaggattaaatatgagggatttcatccagtccattgcggaatgtatggttacaaaatagactcatccccctgcttatagtatgtagcttggaaggccttggattcacacgtctggtgctgccctgtcttctccacatcaaagagtaaagtatgttgttgaggtggtaaaaagtcgactttgtttgtcactaaacctgcagcattctcgtatattgaagccgctgaagactagggcctaagtattgcttttatccgaggcgctacctgcgactctgcatgggagaagagggctgaattgcaaacttttgtgttctggcttctattattgaatcaggcttctattattcaatgtttagttaccatgggaaaagaaagctaacgcattaagtatcccacctggggagtacgttcgcaagaatgaaactcaaaggaattgacgggggaggcccgggaacggattcacagccgtatggctgacagacgattactagcgactcctacttcatgcaggcgagtagcagcctgcaatccaaacgcccttgcggctgctgacgcagctattgtatatccattctttcttccatccatccctttccttcattcgggtcggtcacttttccgggctgggatcgagaagtggaagtcataaaaaacatttatttatgctatttgtaccggtcaccgttttatggatgagtgctattggcgtagtcggcctgactctgaacctacatgcctatgacttcgtttcccaggaaatcagtttagcaattctcgagtcgtcaatgattggtgaaccagcacattcgtttgcaactcctatgggagtctgggttgattctcggatatgaagatatcaaatagaatacatcaaactcgcatgtcccgtgactcatgtgtggtatttgaaaggtctttctagttatatcacgcatattttagataaaccccataggtggtgcatggttgtcgtcagctcgtgttgtaaggtgttggtttaagtctcgcaacaagcgcaacactcatgtttagttgccattatgagtttggaaccctgaacagaccgccggtgttaagccggaggaaggagaggatgagagcttttcctagaattgttggcactacctggtagatgctttcaacacttcgagttggtctgccataatatacaggaaatgttgggagctctgtgtgataaatagaacattgttgaattggaaatgctatttgtgccggtgaatcgacgaaactatgtcctatgcagttttttgcgcaatgtcatgtcgtaaaaaaatgttggacataatattttaaatcttttctataagatatatttctctcaaaatggtgacatgataacatttttggtatctatagttttcggctcatacatttttgtattttttggtaacatttttgtatttttggtatctagagtcctagcctcacaaatccaccaaaaggcaaaatcgcatcctcacatatctgtcatacatgtgttctacttagtgttcttagattaaacacgttgaatatgtagaaaccctaataatctgtcgtatgttgcattgactcttaaggggtatatataaagtacataggaaatagagatttgaagtacaagacaaagttagagtagattatctctaggattttatctctctagtttgtattcgattcttatctttaatcatatatgtacttctaacaaccttattgtcttacattaattatatgtgaactaaaccattgttttagtttgaaaaccatgggcatagtgaattctccaaccaacacacaacgccaaaggaaagttattaaaggatagcttgtcgatttatataactgaagtgtggatttgtgctcataaaaagcttgttagaaaaagccatctatttgtttgggcttagactttgtcataaaagctaatagctaatagtatatttgcggctatgaaatttccaaagcatgattaaaaagccaatagcttatttatttagcctctacatttttaccaaaaaaataaaaaatctaaggacacccctaaacaaataaggctaagttcgaatgtgagttttggggcgagctttttctggcatgggaaacgaggcaagcaattagtgtacgattaattaagtattaattattaaaaatttgaaaaaatatatttatttaaaatttgaaaacttatagattaaaagtactttttttagaaaaaaaatacatagtttagccatttaggaagtgtgctaatagaaaacgaggatgttactgaaagtgcatctaggcccctaatttgtttttatgattaatgacaatacaattagagaggactaacaagttttactaagtgaatgcgaaggattgttagtccgtgatgatttgtagcgcaatgcatatctcaacgaatgtgacaaaactatgagttgtggcaatgatcaaaggttatattgtatattttcatttctttgggtcattaggaaaaccgcactattaagattgatgatgcattgacatatgaggtgtgatgaatgtgctcaaaatcattttttataagtgtatctcagtttctgtattctggaaattttcggagttgtccgaaagtgatgacattccacttccctccatcacatattaacacatatccacctgatacctcatactctgccctggtgtcaagtggtaactggtaaccatgcatgtatcaccacagaaatatgtattctaatacacaacaaagattttgaaattaagaattgacaatttaaagttgttaggacgacaatgtggaaaagcaccctttcacagttttggttaatgaatgatgagtcgcatcatacagctcacattatttcccttaagattttaatcatgacatttgtgtggtgcaaataatatccatattgcgacaccaaacacttggttagtgacagaggtgagcatacttctattttgaacacaaggttatgccaatgcacacctcaatctggtttacatgaaaagaaaagtagcatggttaatataattagaacccatggttgttagcactaagtaatattacaaggactggcatgaacaaaagctttagtcgaaccaaaatttatagcagaaaacaaggagtggttggattggcaccaaggtaaagctaaatgtaaaatgtttacaaacattgattttgatatggtttgggatgcttggcaaaattacagacaaaattaagttttttggaaccaaataaatggccaaatgacacaaaaaaaagttgtttcgaacctaataaatggccaaattaaacgttggagattttttgctatatgatcttttttttaaatagggaagtatctgtgcgatcttttcccatcatatttacatgatatactcatatttatacaacatgtataatatttatctatttggttgtcaacaatatttggataattaataatttaatcatatatatatacataacatgtataaaagaattatataagtagtattaagatgtattttacattgttacatccttctcatttgtccattttagaaacacaatataaacgcagacgctcgtaacatgcgcacactcacccttataaacatacaccctacccctttaataagtacccctccgtactcgtaaaggaagtcattttggacagcgacatggtctccaaaacacaactttggctccttgtttctataaaaatatttattgaaaagtgatatatgtatactttcatgaaagtatttttcaagaaaaatctatttatataatttttacattttcaaactcaacaacttttaaaaatacggaaggagtcgtataagaaatctctttttaaaaaaaacttgtgaactaacttaaggcaatcggactcctaaattcttaattgaagctcataattttctaaaaaaataaatatccaaatgaatttccagaataaattttaccttaaataaaccgtataacaataacaagattaaagtagctttcacctgttgcattgcacaagcattttttgctagctgtaaaaaaaacaaacgtggcattatcaacctttacatgtcttaggctttgttcgttctagggagatagaggagattgtgtctcgttttccgcgcgcacgcttttcaaactactaaacgtgcattttttgcaaaaaaaatttatatgaaagttgctttaaaaaatcatattaatctatttttgaaatttaaaatagttaatactcaattaatcatgagctaatggctcacctcgttttgcgtatctttccaatctcctcaatcctcttcttctcagacacatgattttacttcattcaacacaggccattttaaggcccatttcgagtttgctaaccaatagttccttcctggtccaatagagtaaggatagaagtagggttccctagaagtttttcttttctttttttatttcattttctatattcttttctctcttcttctaggagtatctctctctctctctctctagcgaactacccaagccaagccactgccctcctccctttgccttgcgcccttctctttcctccttcctcctgcgtttgcgtgacgaggaacgaaagcatcatctccgccccccgccgccgcctcccgccgccggcgaccgcacccaacgcccccttcgtcctcccgtgcgcccgcccctctccgcatcgaatcgatcgcgccctccaaagtcggtgcagagttcgttgggcgagcccgcggaagggagggaggtggggggggggggtgggagaggcggccgtggaggtgaggatgagggggaaacccctcgagccctcctcgcttggtgttatgtgtgcgcgacgaggctagggggagagtcgatttggggggggggggggggaggattgcggggggcgcgtgattctggatggattggtgctttgcgctgcaggaatttgtgatcgcgcggtgggatttgggatcaatcagaatttcatgcgtgttgccaatcttttttttatgtttggggggtaaggtttgatagggattgttggggccaaatttccccaaatcttctgggactagcgttgccgacagttgcttcagtggtcgtctgcatcgaccagcgccgcagggatccgccgccgctgccaagatccgcctctgtggccgtggattccacaccacagccgctccagttcatgtcttgacagactacggatgctgggatccatgcttgccgctcttgatcgcttcatccaatctttgctgaggcggcgatgatgggtgtaccgcgtattcaatgtgatgttaggatgttcagtttctacgctaattgatacgcttgggcggtttttgctcactaaggccgatcaagtccgggcttcaattgtatttcacgcattacatgccttgctggttttatttgttgtttgtaacttgctatgcaaactttcctggtgggtgggcattagctgcaaattgtagataggatgatcacttagatagacccttctctgcatttgatcatctagaacttacacttttcaactgctgtttctctgcagcaacgtcctttcgttatacaccacccattgcaagcattccgctcggagctgcataacatcatctccctagaagtcaaaaatatatatgggctgattttaacatttcatgggaggttttgaagacgatgaaccaccctcgaaacgcgcaagagcatcctcagtagaaccagcaagtttgttagatagtttttcttgcttgaaacctgccgctcctttgggaagcacaatggctagacctttgccttcccaggggaaagaagttatggttggctctaaaggtgttattaagagggatgaatttgtgaggataatcacaaaggctctgtatagccttggttatgaaaaaagcggagcagttcttgaggaagaatcaggaataactctgcattccccaacagtgaatcttttcagaaggcaggtacttgatgggaattgggatagtgcagtggttaccttgaagaaggttggccttttggacgaaaacattgtaaagtctgctatatttctgatactggaacaaaaatttcttgaacttttgagaaatgacaatgtcatgggtgctataaggactttgcagagtgaaattacaccacttggtgtcaacaaaaaaagagttcatgaactgtcaggctgcataatttcttctccacagcatgtattacttggtttttcgaagcttggcattgaatcttcaaactcacggctgaagctgctagaggaattgcaaaaggtgcttcccccaactgttatggtaccagagaggaggttagagaatttgcttgagcaagcacttactgtccagcgtgaagcttgttatttccataattctattgatggcttgtcactctacactgatcatcactgtgggaaggatcagctaccatcttgcacggtgcaggtaataacttatataagtgcttatttcagtttatagtgttatgaatgaaggttgtatacttgtcttgactgcttatacacccacataagaatgatttcttggcctactgctctgttgttctgtttaaccacttaaattattttcttgatccaccactgggcaattttatttaaaacattcctcaaatactgcctttggccaccatgaagtaattctcagtaggttgttactataatgttgttaccagactagagaggagatttttgttaaaagcagtccaatagcttattactgaatcttgttacgaaaggtcctacaatagatttattatagcatgaatatgttgtgtatcacttctaatggctctgcaatacgctttatatagtaatgagcttctctgtagtccaactggttaatgctatcttgggccctagcgctaacttgttactgatgcaagtgtcaaagttctctcccttccctcccctcctactaaacaagtaaactgcactattgtgagtgctcaagtgctctgtgtttttggatagtaaaacagaagttacagaacagtttacatggaagcaggaaaacttcaactttaaaaagttcagcctgcagttgtagtaggcatggaccaagtttttcttgcatattcctgaaatatatatatttactatttagataaagtaacatagtttgatgcaaaattcagatttggatcaagaaaagatttggcttaaaatttttatatcagatagagcaaataagaaatatgtgctactcatcttctctcattctggaaaacattgcctttactataaaattagatggaaacctagctttttgctatgggaaatttgcctgtctaaacgctaaacatgaggtgtaagttgaatccgtgttgtggctaggtggctgggctttggtgtgtttttgtgggaaatttgcatggagaaatgtaaacatagggcctttttggcacagctccagctccagctccagctccacatcttctggagctggagcctagctaaacagtttcagctccacctaaaatgggagcggagctgggtggagcactcacacaaaatgaactagagaggtttagctgggtttaggctgctccacaactccactccagaccaaacttctggagctaaatttaggagttagagctctaccaaacaggccctaatgtgcaaggtggatttgctttgtggttttctataaccatgctttgtcatatactcattttttttaccgttgggtgatcaactgcttttttttttcccgttaagttattcgccaagacttctctttgctggcagctccatatctcaaaattcactggtactaatcgcacattaaaattcttgttgcaggttctgcgtgcacaccgtgatgaagtatggtttcttcaattttcaaacaatggaaagtatttagcctcagcatcaaatgataaatccgcaatcatatggaaggtaaaaattacgaatctatccatgaacatagtggcttatttgcatggagctgtttgtttagcagtccaatagcctgttgtccctgaacttcccattttgcacctttcgtcaaatcatgattttgcacaagttcattcaggcctgattgggtgggaggatttggatcctttcattgaattaaatccgagacattcttagaacaatcccttctgtacaccctcaggttttgtgtctctgctgttacttctgtctgaagtgaattctgaaaaaaaaaacgatctctgaaaattaagataaaatattgccatttatctgatcatttcatcagtctacttgagagttatctccagctagctttatcagcaaggaatctaatatagatatttgccaattttgccctatgaacttgtagtataacaccttttttcctagcttgtaactattgccatgaaagtgcatattttctcatctggtcacagtagtctgtcttacattccacctaatctaagttggttcttatgcatgtcattttcagtttaattagctgagcttatagtcatctggtatatctatgcccaaggacattaaatttttgaaacttattcttcaatttttttcgtcaagtcttcttcacaattcgaatcctcattagatctctttgcagcaggttggcataaaataaaattttaatttcttggtctcacagtttctcccctgcaacaatgctttattttagtgactgaatctcctctacaagattttccctttgtcttatggaaattagtatgttgtatataatctgttgcagagaacttcattatatgttttgtttttgttattgatcatgatgtaaagggtcttttcttgatattctcttgatgcaaagcatatgctatcattccctaggttgatgaagatggagagctattgctaaagcacacattgactggtcatgacaagccagtcatgatggttgcatggagccctgatgattgccagcttctcacatgtggaatggaagaagtcattcggtgttgggatgttgaatctggcaaatgtcttcatgtttatgaaaagtctggcattggtctgatctcatgtggttggtttccagatggaaagcatatattgtctggtctaactgatcataacttttgcttgtgggatttagatggtaaagaagtagattgttggaaaggccagagatcatctaaaacatctgattttgccgtatcaaacgatggcaagcttataataagcatgaatagagagtccaccattcgtttatttgatcgggagacaaaacaggagagattgattgaggaggacaatacaatcacatcattttctctttcagaagatggtgatttcttgcttgtaaaccttataagtgaggcgattcatttgtggaacataaggaattgccccattcgagttaaccggtatgctggtcataagcgcagccggtttgtgataaggtcttgttttggtggatccgagcaggcctttattgctagtggtagtgaagattcacaggtatggtgattttgcttgatggccacctatcactataaaataatgatatggatgttgttaaatttcgttgttacagtgttcttctattacttgtgctaatgattggcattctgcattctagatttcctcagtatgtaaggaaaatatagtcatagcatacgtaaacatcctcaatacattggattattacactgtatacaaaaacatcactacatctagttcacttttggaaccttgcacagtaccgcaaatgtattaatgtttaggcctgttcttcagatttacactgtgttttcttgttatctaggcatcgaccacctcattttctccaaaatgttatgaatgcataaatattgattgctgttttatcaagtctaatgacttggaacggctgctgctgattttatttttagaatagaggtgacagatgagtttaaagtttaatccaaataaatatgcattattatgttgggatatttcgtcagaatttactgtctttatactgataattagtagtctaccagatagaaccatttagtattccagtaatggcacccattatctgatatacaaaattaatatggaaaagaagaaagatgaaatgctacaaattactttggatggagctagttaagtctcaaaattgttatggcaaacaaagtgtggagctatgtgctgtctagcgtggtctaaccactagattgtcacgcatcttttcctatcatctgcatctatatatcttgtcctgtcttctgcaacttccgtaacctcaaaatctggaataattttcctacttcagatctatatatggcatagagctactggagatcttattgaaactctgcctggtcacaccggcacggtcaactgtgtgagctggaatcctgcgaatccgcacatgcttgcatctgcaagtgatgatcacacaattcgtatatggggtttaaagaaggccaatctgaagcgcaaggatgttggcagcagcaatgggatctatgcaaatggtaatacacccagcaatggtgtggtacaccagtgcaacgggaacagcagcaaatgaacatggcttgctaaccaatggatggatgactggcatttgtaaatccccttttccttccctttcctttagtttcctatccatcagggaggacgccatagtaaaacaaagctctgcagcacatagtgtggggaaacctgctgggtttcatgcacgatctctcatgtattccatcttactgtttgtcacatttatttcttaattcatgctgaaaagatatttcgatactatattgcaccttaaaggtctttctgttcccttcattcttagtgcttatggtaacaagtgttgtgatttaagtgctgattgatcaagcacagaacagattgtaactgggtaacctagggagaaaaggtcatctttaatgtaatgcaacatctatgatcgtcattgccactaccccaaatttaaagaactaaagcatgtttcatttgaaatattttaggacattttatgcccacacttggaatagtataaacagcataaggttgtctggaaatttgtctgtattctgtaaattacactaacaaacctatgctgcgtgattttttttgggtatcagatcctacattggattattcttttcttgctgagtttgatcatatattgaattgtagcattgtagattcaatcaaacttataaatgaacgcatacatttacttaattatactctacattgtgccctgtattattatgtttgtggatatgcctgacccaccttcatatctttggcctttttggctttgctgtcttattaaggaagtaggtcagttgagaggtcttatatcccaccaacaatgataaaaaaaaagggcacgtggggtaggccgggattcttgatggggatatatatgctcccaaacaaggcctaaaaaactccatggagcaaatgattttgatttttaaatactagtaaatacgcggaattatctaaatataatgaagaataataaggtaagaactcattacttttttctctcctctaaattcatatgcaattattctatttgacatgaaattaggaaaaaatgacgggagtaatttatttgttcaaaatcacatgcttcctccgtttaacattataactttgctttgtcattttttcctagtcaaactttttaacattataacttgctttgtcattttttcctaatcaaacttcctttaagtttgaccaaatgtatagaaaaacataatactcctaaatattatcaaaatatatacaatgttatatttaatgaagctaatttgatattatagatgttaatttgtttacaaactcaatcaaacctaaataagtttgacttaggaaaaagaagtaaaatagacttataatatgaaatggagggagtaacaaattttcatgtaagaatatgttaatgtcataagttcagtggatccacacaattaaatgtgatcaatatggatcataactgtgttaaataaatagtttcggtggctggtaaaaaaccaatgagatgaaaaaaaaggagtaaatttcacttttgatcatattttattaccaatgttttattttgaatcactctttaactaatattttttctttggaccggttaatcttggctttgttttattttgaaccacctgactctctcaagcatatgaaagatcttgagtacgtcggctcctacccatcaaagaactctcacaactatatgaaagattgtttcacaactatatgaaagattgtttctttaggatataacaagttggatgtaaatggataaaagagttaagatccaaagaaccatagagatacaaatactcaatttagaataaaaacattggttaaaaaatggtttaaagcgaaacatcggtaataaaagactatccaaaataaaatttgtactttaaagaaatacaacttgttgccggatgtgttggcctatggatgataactacattcctcggtctctttctagatgtgcttttgactaatgaagtgtgatgatgaatccatttcattcaataatcagccgtgtgtttggttcgaccaacaaacaatgccctgggccaatccttttgtttggctgagtcgcacaaccgagcactccgtcacctactgtcattgaaacacatactttctatctccgcataaatagcatgcatgaaacaatcattacaccatcgttagctaagcaccgagagactaatgagtaatagttagagcatgcccaagagatgtccaattctattcccaatctcaaaattttgtagttatgtataaaaaaaatagatccaatagatctccaatcaacatcccaaagaattgaaaatcccttttccgctattctcgttctccacgtgtagtgaagagcaccgcttcccaatctgccaatcacaagcaatttgcgcacatgggtgaaatatctctgccgtcgcaagcttgttcgtcactgcttcaatttgcgccaccactagccgtcacaagctcatccgctgttgattcaattcacaccacagccggcccccgagctcatccgcgccatgctcgattcgctcctctatcaagccccaagttgcaccacggccgaccctagagctcgtccacagctagccattcacgaccataattcgtgtctccactgagcctcgatttgtgctgccggccatcgggatcctttcgcacccttctctagccacccttgctgtcacctaccgctggtgctaacttgtctcgctgtactctagtctcggccctgcgcgagaggtagaagaatgagaggaagaagagaagaggaaagaaagagggaccaacatgtggtcatatcggtcaggtcattgttcaagagggagagtaaccattggtagttttgcaagtggtcctactttttttattataaataatatgtttatctaatctgttggagggaagatattttaggaccataaattctggttaggaattcttgaaaactcatctagggagcagatttatttgggtatctcttgatgatgctcttactcccccatctcaaaatatagcaaatctagaatttgaggggatatattttagtacaacgaatctgaacagggatatgcccaaattcgttatactaggatatgtcaaatccagttctacgttgctatacagtgggacggagggagtatgatctatgaccaagcaaaagagtcatcccgtgagcctagctacttgtcctagagacccatagacacccactctttaaacttgcttgtcctaaaccaaaacacacaataagatgtatgatcattaaatgcactcactaggaaatcgacggtggaaacaaatgattgatggaagcatatcagagccatgtacccaaagatagataagcatagttgagaagagagaaagcaggtactccatccgtcccgtaaaaaaaagtacctattacgggatgtatcacatcctagtacatcgtaacactatgaatctagataagagctacctcttcttcagattcgtagtaacaggaaatgtcacatttcgtactagatttattttttatgagacaaagagtagttcattcataaatagtagcggatataagatggattgagagggaaaactggacgaaaccgagtggcaccaaacaagttgaatctataaagcattctatataaattgaaatgtttaacaattggcgccagaaaatgccacgcctaacactaccatcacttctgacttgttgcatttaaacttgcaaacatcattacagccacccaagtttctactactacattctcgatctctactcagctaaaatcccaaattataccttccgctagaatagaaaaagtcgggaaagagaaattaataaataataataacaaaacatagtaccatataccaatgctagctaggattttttcagtacgagggcatgatcaactagtaacatttcaacccttcaacacaacaaaatgagaaaaagaaggcggcttgattgaaattccaccttgatggcaccaggacactttgagtcttgattgaaataccaccttgatggttccaggacacttgtcttgaagaacaatcaaacagcatcttcaagtacacaatcaaacagcgtcttcaacaagcaccttctacagccagagatagataccaggcaggtttcatgagcaacaaaactcaggaagaaacttcccagtaacaaaaacacatccatctgcataatacatgcaaaacagattgcatccctacaaaacataataaaccagacatgtcgcaacaatagtaaacttggtgccttatattaccactgtttatcgatgctccaaccctctcgatctttgtttcctggattcatattactattgacttttctttactgggaaaatgagggaagagtctccattttaaagagccattgtatctagtatactgattacccaaagaagcaaaaacactatgctttcactcatattttccagctttctgaacttgggatagattctgatgtcatgggtccattactggacccatgagaactatggttgttaacaggcaccgtgcgctgagcaaaaccgagcaactgcttccgctgatactcatttgtgtggggaaggctagcacgcaacaattcaactggcatttccctgcctataactgctgccacagcaggttgtgtttgcaatgcatgaatcacactatcgaatttactcatgcagtactctgtaagcagcccaaagaaggcatcaaatgatgcttgccatagagctctgttttgcatgctgtaggtagaggccacatgctgatcagtgagaagctctgttgctgtgtccagtacagactttatgatgaaagaagccccatcacctgcagcatgtccaaggggtcgcagagggggttgcagcgaagaacacacaatagctgcaaggcaagcacttagtccactcaactccaaccgaacaacacaggttgatacagcagtagcaagttttgtcgttgtctcaacagcactactatcagatggcaaatttccaaatataaatcttagatgccggaagactgccatgcaagcaattctagcaagctcactgccagaactcacaagttcaaggtaacgagaaagtagcttgcggcccttcggaagagagactattcggagaaacaccagatcatcatttggtgagagaggtgcattgttactaggtgtaagtggatcaactagttgcagggattctgccagctgctcaaggagggcctgtctcctgtttctcagttgcaagccaccatcttgctgctggctaaattgcagcaagcgatcaatatcatctacatcaagcagtaggcagaggccatcttcaattgtgattctagcagccagcattggttcttggtcaagtgtttttgaagcagatttttcagtaacgtcatcacttgattcagaggtttgttcaacatcgaggagcggacgaggcctgcggatggaagaaaatggtaaccttccaagagcatcaacctggagatacgcatgtggctcatctttactccgtgcacgggatgatggatctctaatcaaggtcggacagaagtggtgcttgagttgacctcctgctgactttttagctaaacaggcttgatgatagtaatcatcaatgtacggatcattgatctgagtagcagcttgctgcatccttgcaatgttctcaatttcaggcgtggacatgtacttggatctgaaccgcggccacccattatccatcctcataccagcaagctcaaaaccttgggggagataatgctggccatgcactccatggtgcagcattgctcttgctctcggatcactcaagtcaggcattgccaaatttgcatcaaatccactcatcatttgtgatggacgctgaggattgtacatctgacaaccttttggtggaggatgccgaggaccaagcatctgagcatggaactgtgagaattgtggcggagagtgttgaattggggccattccatgttgtggatggcgtgacagcatttgaggtgggaccaatccatttggacgctgcagattgtgctgcaccaaacctggtgtaagcatggcaccatttggacgaactggcccactgtttagagcattctgttgcaaattattagttgataaacctgctgaatccaaatgagccatgctccgaccaagtggccctggaggcataccaccacgaggaaactggggatggtgtaactcattttgtgcagatacaggcatttggaatgaagtgggaggagatggcatgttcatgttatgtggttgacctggcgaagaatgggatactgcaccagatggagggtacggaatgaatgatgatttaggtaccggaattggttctgtgtgactgtattgaggctcttgttgtgggtatgatgaagttctatgcaacagagatggcattgctccaagaatatgttcattaggattgtattgagcatcttgctgcggcgatgaggatgttctgtgcagtctagaatcagcaaagcgggctaaatgaggtggttgagaccaccggctttcattattcagccctggttcagctccaaatataggctgtgtaggccaatatgaatcttgtgcccagtccagagtagaacctacacaaattgaattcattaacattagaatacaatgttaataaatcagaaaccatatataagggcccctttgaatcgtaggaatgaaaaaacagaggattctggcaggaatacaattgtaaaacagaggattgtgaaacacaggaaaaacacaggaatgaccatttgattggaccagaggaaaaacgcaggaatcagatgagagagatagactcagaggaaattttccaagaggttagacctcttgctaactttcctccaaaatatacataggattacccattccataggaattttaaaggattggatatgattcaatcctttgtttcaaagcccttcataggattttttttccataggattgaaatcctccaaaattcctacatttttcctacaaatcaaaggggccctaaacctacaagagaacaaagactgtaaaaatgtattgaaattcacattctaacaatggaaaattaatggatatgttcatcccattggccagatgtaacgaatcttacatatatccttgaaaaatggaataaatcaaatacccactcactttgtctagaaattgaacccccacgactaattattcccgattgtgttggttcattgatgcttctggtcaactgaaagtggagaaatcaacaaataagttcacagttaaaaaagaacaacacaatgcaagcatacaaataggtatacaacagtaatatgcaactttatttatctataatctacattctgcaatttctaccaaaaaaaaaaataaaatacaccatgtttctgttagatcacatttgtgtatattatgtggttaaaaagctatgctttaaaaaaaaaacaaacctttgagaatgctccagcaagatcatcaacgccagtaaatgaacctccaccttcatcctgcaaaagcaaaagcttgattggtgtgagcagctgaagctgattccttaatttgcaacataaataagtgatagtgtgatactgcaatcttttaaggtaatcagaagcacatcacagcttaatctgttatttaggccgcaacactaagcgaagaaaactataacaataagataacctggatatgatccagataattactgcactatttcctgagctaaatttgctcagaagtacagatagtgagataaaacaacctctaatataatgagaagtggacttgaacaactctgcagcagagaaattacaagctgcctcagattgcaaggcaacttttttggtgaaatattatttccgctaaaataaaattaattgaactctacaaagttttcaagagtagcagtgtgcataaaatccagcagttttctataacaggtctactaggcaattattatgggcatgggccaaagaaagcttgaccagtaacacatgccttccaaagccaactcctagatcctttggtccacactcgggcatatacgaggaatgaacactccatgcctattgctgcataattgcctgttatgaaatataatcattacctatgtaacaccaacgcaggataccagaaaagcgattttacgatcattctcagctactcaataaaataacaggtaaactactgaggatcccaaaattgtatacataaaaggcctacatacatgcacataaggccccactgcttcctgcatgctgtaagccagccagcaaacctatattgaaataaagaaggaaaggaggagagtacaatcaatacagtaacctatattaactttacacttggagacatgaagccgtgctccgtaccacgtgactgcagttgccaaatgttccaaggcgcattctaatattatgttcccttcctacttcacccagtcctctcccccaccattacatgccaagtttgctgctgtttcccctcctccaattccccaaattttcgacctcgctatcagagatagcaaatctgcttcaatttcttctcccccaggtgatcgtccttaccatgagctgatggcaggggaaaggtgcagtggtggcgataggtgttgagaacagcagcagtacctctggtctctgggtatttgggcctgctgtatctgtgtgtattgttccagtcccatgccgctgccgtattgcatctgttttcttgtaattctaaatcgatttgatgcagttccgatatgttgtatgacatgcatatcatgtacggaacagcagttggtgctgaagcagtgattcttggatagctactaggtgggtgaactgctgcgtacccatcacaaaatttttaaccttgattttttctctactaaaaaatggagtcatccgtccgctctcctccgcaccccaccgcgcggagcacgccctgtacgcctccctcccgtgagcgtagcaccctccctacactccgagcccatccccaattatatgggcccataagcccatgaatcaatgtccattgctgcgcacgggcatattactagtgcagagaaaggatgctgttggtttcctatttggtgacataagttccgggatgatcaagtcatgggatgcaagaaaagctcaaggcttgcgagcgctcttctgcagctcaggtgtacaagttgagattgaaccgaggcacttgtctatatgtcttgagttatagtatatctgatgttaattccaatagatggaagtaatgaattcttaaattgtttatggtggattcgcctgttcgaataaaatactgcctttttatttgacaatggatgcattaagtcgttgtaaggtgatacttagaatagctgggcatcatgatacccttcttcatgagactttttgtagttgtttccttatctgaattaggctcgaaattcactcgacgttgagtcgagtccagcatgagccagttctctagctcggaatccagcttggctcaaagtgagctcatttgaagtataatgtgagcttagtcaatgcaagactcatccatgcatcccatggcccagccatatcacattggaggatataagctgataaggcagtcacatgccacagccacaaatctcacggcaaatctctcccatctgtcgattctttagtagacaagagtggtgcgagctgcgagcaggagaagatgggtggtgcaggcgtgcgggcaacgggcaacatgagtaacacgaacacctgtcgccttaatgtgagattcttcggtaaaaaccattccccgtaactaccgaaccgattttatttggttttttcggcttggtttatatttgtaaaaaaaaaattctcagcggctattatcgagaaaccgaattttatgaaaaccgaagaattgacccgactaaaccgatgaaacagaacatcgacacctaccttttaccacaatattttcgttaaattctgtgtggtaaatatggtattactccctccttcccaaattgatcatcatataagtttatacactaagaccaaggataatttaaatcacatcaatctcccacaatgcatgcatcgattaaaacaccatgccaattacaccttagcatacacacattctcccctgctgcattaattgtattctgatgaaatccgtatccatacggttatatgatgatcaatttgagaaattttgaattccattatatgatgatcaatttgggaaggagggagtatttgtttagtaaatacattatacttacaaaaatacagatcattgttgtgctattggtagatacaagttttttcagttctactttggtaaataccatattttaccaaagtttacagcaactcttttttaacataattacaaactaagaatgatagctgacagttaacagatgagacaagaagaattaatccatgcatgcacacaaccacacgcaggataataaaacagtgacaatcactcaagcagcttactgatgaacatgagcaagcaatattaggtgcttatgttggttgtgtagccagtattggccagtcaaaacaagtggccgctaattgttggaaagttggccaactgggcaactgagccaagaagattatcaagccgggcatgcaaagacagaaacatgtcgcagtacacaagacaccaaaaggccaggttcatgttattcggtattgttgatatattcagttcctagccagtttttaccccaaaaagcaaaatttcaaaacatgttttatcaaacactaaataacaaatactgatcaaccgagttaaccagtgcggatcgggatagttgcgaaacaccccctacgctacacatcccatttgccactttcctagtgcatcccaaatttacccttctgttgattggctgcttctctctgctggatgctacagcagtcaatgcctaacaaaggtgctatctaccctgaagttactctagaaaaggaattgcaagggcgagcagaaatcatggtagtgacagcaccaaaggaaagttccagcaataacaatggcaagaaacaacaatgtctaagcttagctctccatcttcccgtcctcaactaatgtccctctctcctttcaatggtcaacacagcatggtccaaggcttccgcatgatgagtccacagtctcatggactatgtgcatcctctgaagctaccataacaccgatgcttactatttactcttcattcaacataaatccgtagtgttcaggtggaccctgctacctcttactgaaccatgatagactaactattaattcccgttggattgaacaacaatgaaaacaaacaagaagtaaaaaagaatgatcaaaataacccctaggagcacctcccacctctctctcatgttctgaacacaaaagggtgtttgctaccaaagtcatgagtgctgtgggaattacaaaattacatactgggcacactgtgtcataaagaaacattgatttcttgtgaaagttttttaaattgaaagtaataaataatggatggaagtttgtcacatcaaaattaaatgaactgtcatctatgttacctcaaacatatcccttccataagcagaagggtattcttcatcaccaggaccaacaaaaccagcatcgataccatcatcatcctccaatccacctagctcaacttcttccaccgcgttgttgccaaagaaagcatactgcgacgcatcaaacttggtatcgcctgcacagagccagagacaatcaaagatcccgggaatcagtactgaatggtacagcatctccacactcctttcatttaaaggtaaaaggagaagctattttgagttgggattgatggtgtgctccactcctcaagtgacaacatatttcgtggctagatctctatatacaactactgaaacgaatcaaacaacccaaactaaatcacttcggttaactagctaatccggttcatacctagaacacacatagcaaccacaagcataaaccatccgaaacactaataatccaatcaacgagaggaagatcttctccatctaggggcaatctacgagaagagacgaattgcattacccgtcgacgccgacgaagaaggctgcgccgccatccgcggctagggttgcaagttgcggcagaagatgtgggggacacacaggacactggcgcgccggccgaacggagcggaggccggagatgccggagcggatcggggagggagagagctcgagagaggagatggcggagaagacggcggaggcggaggaacgccgacgaggaggagccgagcccgctcgagagatagaatcaggtcagaggggaattttcttttttctttttctttttttttttggctggtatatgtgggagacgccaaaacgtgcgaactttttgggcttttttagattacgtgcaagtttgacgggagcggtaaaaataactgaatcgtatgtgcagttctgatgatggtagaggtgaaaagtgactgaagcgtgtgctgttttttttttcaatcagatcttatgtagttttgcaattatcaccctgctagaaaaaaatttcgagatttcaatcgagcaaaaacaaatttcagaagctaagtgaaatatggtgaatacgagtttttaaatatttgaagagaggtattctgatcaaaaccactccatctaaattctcgcgtcgccctcccctgggcagctcgggaggcgacgagctccggctgccccctcccactcatcttcctcctccgcctcgccgccacctgagcggctgccggcaaagccgcgcggccgcaaggacagtggcggcgggctcctcgtttcgccgatagggtctcgctcccggggccaggggagccgcccagggcggcggcggcggtgaccaccagatccttgccgctccggctggatctggtggggtggcggttggcggcagggatggagacggcgatggtaggggcgagctgcgccgcgcggcggggatggcgacggcgggccagattcgacgcaccggaggcggatctggccaccctgcggccagatcgggtggggcgagctcgcggtaggagcgctcgtcacggcggcaacggcagcgcgaggctcgtggcgacgacggcgatagcgggtggccagccagcggcagcagcacccggcaacggcggcgaccggtgaggtgcccacggcgcgaggaggcgcggaggtgcggcacagctggtggctgtgtaggccggcgaggcgcgggtagcggcgacggggttagtcgcgatgcgaggaggttcagtcggcggcaacagtggttgcagctatcgagaggagtgtgccattccggtgcagcgaccagcacaacgaggtgacatggcgcagccagtggtggcatgcggaggctgcccggcacggggcaccggtgtagtggtgcccacacgctggcggaggttcagatggcagtggagcatcggtgtgtcaacagtggataggcaggcggtggatggcgggtgaaaacccagcccgtccttggccgagccagcaacgatggcagtcgagcgtcactccctcctgagggcgttgtcatgctgtctcaccccctctagtgggtgaaagcgcagtcaaggttcttgagacctcgcggacagcggcggcgatgtttgttgtttctctctatcgataatatgggcccggggggtacctaggctaggaggaagagaagcctttcctccgcaacgtgcgcggtggacccagcccccctcggggggtcgtgcggtcggccgaagagcgaccgcccgtttcgcctcccgggggctcggggtaccttgtcgcgcccctcgggcccgaggggctaaaccgccccgaggccctcgctcggccgccacgtggccgccacatgggggcttgagcggggaggagcgccgtttgccaggcgcatttatgggcagtgctccaaccgccccgtcgcatttaatgcaacgtggcaggacgtgcgccgcccactgatggatgtgcgccaggcgaccggcttttgaccggtctgtgacccggcgatggatggatgggacaggcggcagcgcacccacgtctcactccgtgtcagacggcgtgggggctggtatgccccgtcccatcgtgtgcaaggaaaggacgtgcaggtcaccgcctcccacgcgtgtgagcccatgaagtcgccaagaatttattagggaatgacgggggatgtcccccatgtcagataaaggacttcggtgggggccacccaggggcggccgttcggatcgcttccggcccaaggcatgggacactttttaatgtaggccatgtgggtccttctcccgaacagggagggcagggacgctgcatgtggtatcccctttacctataaaaggaggacctcatcttgcgagcaaggggaggacggttggatgaacggaattctgggtagaggctagtaaagccctagtttgcgctcccaggatccgaactctttgtaacctcaaaaagatcatcatacacacaggagtagggtattacgctccatagcggcccgaacctgtataatccccctctctcttttcctcacagttgacccttcaagcacaattcccaccgacatgggcacgagaacgcgctcttcagacttgcacccggtcccctggccgaactcacaaagggggggtctcacggcctcccgctagagagggtcacccctcgacactctccctggagacgctgtctaggtagcacccttgccggaaccacctaaacttttgttgcatgcttgctctagagtcacgtcgtcttgtatcggcgccctagtttatacaagttggacacatcggagggccttaggggggagcggttccattcttctctctcactccctctccctagatcccttagatgtggatagagtagtgctttgtgtcggttgtaggggttggtttctgggcgatcccagttgtagctcctttgttggtctagcggcggtcggtcacgcttagcggtggctggtccggtgctagccttctcttgggtttgcggttggcgctgtcggtgtgtgggtggtggtatctttttttttccttttcctggttatggcctactagggttgtgattttgtaattttttctactttatcaatttgaacttcgcactgtctcgtccgagtcgttaaaaaaaagaagaagagaggtattcatatttggttatgtaatgtttcgatcttatttgatatttttttatatataactattttccgatatatataagcctatgttaaacttattcttcatgctcacatactaaaaaccaacatttataaatcatgttttatacatacacaaagtaaccaacggtttagatattaagcacgccaaacggcgcgcgtattttctagtatgggttatagctcaggtgggtaagtcccgctatttggtttaatccttttgtttccgatatagcaggacaggtttggcctattgttgaatgttcctttatacatcgatgatgagtattgcagggaggaacatggcacaaattcgaagtgcagacatggcatgtgaccaaaaaggaggactgcatgggaaggaactgacaccggaaggagatttcttggttgccttcctgaggtttggtttgttgtactttttactagttcattgatacttagattttctgttaatttagtcatgcatgtctaaataatagtactatttttttgttaggaggatgagcaatgcgacactttgatttgggtagatccagagtggcatccaaaagtacaaaaggcattcgagcagctttggcacttgctagaacgtaccaatccaggtcggaggcgctctgagtggacctgttatgttgaaaaaaaaacaaaggcagaagagggaatgaagctagagctggaaatggctcaccgtctttcagatatggaaatttcattcgagaagaagttgtccaaacagaaaactgatgacattagaaattggttcataagaacaatagatgtagttgtgttccttctcatgaaattatttgataatatgtactatgcttgccgttgttgattttctacatgtaaattagctatgttaaggcaacagacgtagtttgtcatctgatttgtagtaaaagaaatggggtctcaggccgttgattgtcatctcatttttctagctgtgcattgttcatttgggttgatgagtaccggatggatggttgcaagttcaggtgtactgagacaaattttccagaaaattattcatatggaaccatcacttcgacactattttgggaggctcactggaaatcagtatgttggaacttaaatctgacagtccgcaacctggcatactgccggtggaatattagctgattgcaacagcctgttgagcttggtaactgagaaattgcagacaccaatgtccttaaccagcccatctgtcacaattctctacatttcacaatacgcagctgggtctatatatcagacgaacttggaaagcttagcaatatgcaaacttagtgttatatcagtgcaggtcccattaaatagctttcagaaaagaatagaggttcaagccaagtgtcagtgagcagtactgtaccgtactgcagaggatctggattgcaagacaagattgcaatattcaagctccattcagatatatgctctgttcacagcagacaaaaataagacagcaggttagcctaaaatcttccatttaaagattaaagtccctagcaaaagcttgtgcttttctcacaaattcattacaagaaacatggcagattgaattgttcattacaaaataactacaccatacagcagtagggcatcaacaaagtgtgtacaggacacacgttcataagtctcatagcatgatagtggcaaacaatatataatcctctgtccaacaatacaacttcccacacatcgagatcaaacattaaaattatgatcaaattctaggttcaacttctaccagtgcaaagaaacacttcataattctcatacatcttctactttgctgaaatttttttttcacagagcaagttagtaattccttgagccgtcgagggggcataggggacgcggaatgccacgacaccgtcgctcctgaatgcggcggcgctgctggtgatggagctcaccggtggttttgctgccgcggacggcagatggatgggaaaaaatcgacatcggtgggggcatggatgcggggcaagcgcgccgttccatttctgctctcggagggaggagaaaatagcgaacagatgagaaagaggtgaaattgctaattagcgactgatcatgcacccctccccccgtgcggatggacgcgtggcgcgcgtaggaggggagggggcgcggcggccacgcgcagtgggggcccacgttcctttttcgccggtttttgtggtttcggttttcttcggttttttctttgtttgttttttctgtttttttttctggttttttatatatatacgtatacaaactttatatatgtatgtatatagtgtatacaaactttatatacgtgacgtctctttttttttattttttaatatgaacgtacgtatacaaagtttatatacgaactctgtatacaaactctatatacaaagtttgtatatgcgtatataaactctgtatacattatataaactttgtacatgcgtatataaaatttgtatacgtgatgttttttctcctttttttgattttttaatacgaatgatataaagtttgtatcatatataaagtttgtatacgtcatatataaactttgttatacgtgtatatttgtatattttttatacataaaaaatatatacatataaaatatttttttatagtagtagtactggtagtagtatagtagtagtactactagtagcagtgtagtaatactgctagtagtagtataaaagtagtagtactagtagcaaacaagcaattcagatgttgtctcattaaagcgattgtctagctcttgaagtaaccaatcaataacattattaaaacaatccacttcataatgatgcttgtttgtaattcctgttttttgccttggcttctttggattaatgtatacttctcccatctccagtttggtaagatcatatttgtcacagaagttatacacatcactctctaatttttcccatccatgtcttctaaggtcatccaaatgacctcttgtagatctcacacatttaaccgcattcacaatatcttgatccttccattgtagtgctaatgacaaggtgtttgtgattattaggacagtcaacatgagatgcaaataaaagacaaagtcaaaagactagaaatatactaaaagacccgccgcttgatctctgtttgctctatccctatcatcctcttctacaaattctaacacttcaacaattgttgggaacatatctaccaaaattttgagagttttgtaaggagaactccaacgagtatctcatggcctttgaagacattgctcttggttcaacccttttccactttgaagtagcccacaacctaatgctttgctcacatgctcatcattgatgtctctaaccatgtcctgtctcttagctgaaccaccaaccacatttaacaaggtagaaatcatactcacaatagccacaactactaactgaagttggtgggcgaagcaatggacataataagctgaagtactctctcatgactagtgattgtagcccattatattcacctcgcatattactagccccatcatatccttggcctcttacttgactcaagcttagattaaaatctgccattagagcatcaatagaagccttgaggtatgaggccgttgtttccctcacatgaacaacagcaacaaacctttctttcacaattccacatttatcaacgtacctcaacaccacggccatttgctctttacaagaactatctattgactcatcaattagcaagcaaaacacatcatggccaagttcttccaaaatggaatgtaatatttctttggcaaagcagtcaacaatatccttttgaatctcaggagctatcataagacaattcttcgatgcatttttttctccactaccttgcctaaagcaacatcatgctctgctaagaaatcacgaaactctaagaaattgcctttgttgtatgaatcacttgattcatcatggccccgaaaaggcaaacctagcttaacaacctcctagcaacattaattgatccatttaatcgaacaaaatatgcatttttagtagcttcgctttgcacttgcatatgtatatcgatgtgttgggctctttgcaacaaagcatcacaatttttcatggcttgattatgtaagctaccaacaccactaacatgctcttttagcctactttttctatgccaaccattccaaccatcaaccacaaaggctttatacccatcctctttcttattgcgatctctaaaacaacattctctgtcttttgccttgttatattcaagccaacttccaaattcatcaaaccattcctcaataaactttctgtctttacctgagatctttgtaaccggaaaagtgaatagacatggttggcaaggccctttctgcaagtatttccttctgactatatccctcttactaggatggtaatcatcaatctcttttctcaagcctggatcatattcaatctcgttctcccaactaccatcatcgacttgttctggacaagaattccgtacagctgcattattggaactatcgagcgctttcctcaaggtacttgtctataacctgtcaattaaatagttttattatgttagactataagtgcactgcacaatagaataatgtacacccccaaaagacaaattatttagcaattatgatggtgtcacagtatgcttacaattttactaagtgatggttgatgccttgatggactgatgactacaggacaacagatgtccttgtcccttccagagaaactttcagttcttccctagcttatataaatcattaaatctggataattgaaaaggtgctattaacaagttagaaatcaaataataggattaaaaataagactagaactagaatagatgataaattgaaattctctggaactagttaaaagaaaaataagtacctatcttttactctttagtctcttgcttgtgcttgactgcttgtgcaatgcagtttgcttgctcggctgcaggttgctggttgcctgtaggctgtagtagtagtactccggctgcccgctgggcgctgccgccgtgccgttgcagacctgcagtgctgcggtgctgccggcggctagctagggcgaccaacagcagcggcagtttgctggccaggacgggacgatctcgacaaggcgctgagcggcaggagtagacgccacggtgtcccggcgagtgatggcgagaggagacgaacagactcacacagacgtcgtatcgcgtttgtaaaaagaaagaaaaaaaaaacgaaaaaaaagggagtcggggagatgtgcggcgctggcgctggcgcggttggattgacgaggcgtcgctctctcccccgccggtggcccagacgacgcaccgtgttgatgggcctagccttccacgactcgctcatgggctaggggtggtgcacgaatttgggctgaggggttctcatgtggtgaaaatgggagacccctaatgcgcgagcgcgcgaccagtccgctcctcctactactactgctgtagtgtactacttactactactgttactagcgttgctactactagcgggcccgtgcacgcagcttggattactagctgctgctgctgctagtggggcccacacgcgcagctaggtggtgatagtagtagtactactatactatactactactacttacaaaaatatacacacgtatataaacttttgcatatgtatacaaagtttatatacgacgtatacaaactttatacatatatatatatattaaaaaatcaaaaatatagaaaatacatcacatatataaagtttgtacacatgtacaaattttctatacgtacgggatacaacgtttgtatacacgtacacaaactttgtatatgcatatagaaactttgtatcccatacatataaaaaacaaaaaaccaaaagacctgcaagcaaaaaaaccgaaaaaaacaaaaagaaaaaactagaaaaaaaggcggaaacaaaaatcggccacatatataaagtttgtatacgcgtacacaaactttgtatacgcatacagaaactttacgtcccgtacgtataaaaaaggaaaaaaaaactacaaggaaaaaaccaaaagaaaaaacagaaagaaaaaaccagaaaagaataggaaaaattggtggggaaaaaatcgtgcgacacgtggtgccgtcccgcaagcgtgcgctgctgcggctccctctgcgtgcgccacgtgcctttccgcgccggggggggggttgtaaccgctaaatataaaaattgggcccggtgcctaagaacccctggcccattgggctccgcccctctcccgggttcaaataagcttgtatacatgcggcaccgacggttcctacgcacaaatcacaagtaccacaagatgtagtcggaattcgatggcactgaagagagtgatcctccactaaaacctacatccgggaaaaaagtgtgtgaaatgacagagaaaatagtttgcggcggatattaattactctgttaatatatggcaatgtgggcgaatttaaatttgttaatatgacatgtgggctcgatattaattatatagtttattttttatgttagaagtacgaaacgatggccgatagtactaaaggaaatgaagataacttatctgtaggggaggtggagtcttcacatccgacagtggagctatcccttgctattgtggttgctccgaaaccaacggtgccgccgtccaatggttccgacaacgacgtagctgacgaggatgatgagtactcctcgctaagtgatccttgtccaagcccgaaatgacggaaaaaggacgagggtgaaaaaggcgacaaggactacattccccgtgattaagggataagtacaattaagatctgaactatttgagtgataactattagcccgaactaattcgaaactttgatacctactcataggaaacggggccacggagatcaaaacggtagccaagaagaaagataagtcaaaagacgacgaggtcccagctaagtccaccggctcaaagaaaaccgataagttagcacaggcgaagaaaagaagggcgagagaagcgtcaataaaaacgacgaagggttctatgttgtgacccatgttggtccaaaaggagagcctctcgcccctctgactgcacgtgcgagattcagttcacagtgtgtcataatagtaagggaaaggatcacaatcatgatcaaggactgtgatcatgtataggatggagataaggaagtcctatgaaaagagctgaagaaaatgttccagttcccggatggatcagaagcagcggtgaggaattgtgcactgcaaacaatggacaagtcgtggcgtggttggaaaaacacattgaacacaaaattcgtgaagacgggccggacaccatttgagacatatgccaatataacaccgacacagtggaacgactatgttaagttgaagacctccccgaaagaaattgccaagagcaagaagtttgctgagttggccaagaagaacagatttcctcatcgcttaggctccggggggtatgcaccaaaggtggcgcagtgggcaaaagaggaggaagaaatgaggaaggcggggcttcaggtaccaatggaggaatggagcgaaatatcgaaaaaatgggtaaaagctagaactcctaagatcacgcaagaaggcgaattttcgtttgaagacctcgagctgcaaggggttgccaataaaatagagtctttatccagtgcatagaagacatgattttttaagccaaagagggagaaagatgtgctaaatatgacactgggtactcctgagcacagagggtagggttcgaggtgtatcgtccaagctcagttggaaggaagggttcaaacatgacccctacaagaaatgtgacgcctacaaggatagcctaagggatgaaggggctaaggaatttgaaaggcaaatgatggatttctgcattaggcatcttattttgcctgaccccgcaaccaaagaacctgagccagattacccctttgatgacctgaaggagaatacaccctgtaagttgcacgttccaattagatgctttggaagaactcttgaggccgctacagccattgctatccctggcagaacatataacggagagttcatacccgatgagtatgccaaagtgcagtcgcaagtggtccaccaagggtttgagtcgtacgacatcgacatccctactcctgatggtgtatccgtacttggggatgcggtcgatattataattctttggcacaagaatgacatattctttggattgggcaccggcgcccagtgaaaactggtggtgccaaaaccgggggtgcaaaaacctccgagacctccgagacctcctcagaagaggcaggtgactgataaggtggaagaacccaagatacctatggagatttcagtgccggaggtgtctaaggaaatttcagtgccggaggtgcccatggatatttcagtgcaagatgtgcccatggagatttcagtgccacaactagatgtgcaacttctggcaatagtcggtacagatatagaagttataccaggtttggaatgggacggtacagatctagaaatctttgaagtccctaatcctgcgaaagaccctgaggtgcaagaacccccggtcaatgacaaggccactgagaagtctgaagtgcctagagtgcttaggagccacaattccaagtccaaagatgatcaaaaggagaagttcatggtatccgtctttagaaggggtaaggaacatgccaacctcagagaagatgaccccaagaaggccgctgcactagccgggaaaaaaaaacttggcaattgatgattgcccggaaaaatacgaacatgggaaagaaatatgaccggattttgcacttgaggacggtccatgggagatgagaaggttacataaatggtatatggacactagcaagaaaggcctaagtaatataacagttcgatcaccgatagatgctttcggcggcaacggttacttctggctagattttgaagatctccacgccatatatcgtcgggaaaagatggacgtcaactatgtcgctgctgggtgcctgtgagtatgagtttacattaattacatgaaaaatatgtacaatacaaaaccatgtgattattactaacaaacttctttaaacttcttttgtaggatgcaatacatggatgctaaggagaaaaaagaacttatcggattcctggatccaattaggatctgtcaaacacaacataccgtgaggttatcactagggtcagagtagctgaaggacaagactcccgaagagatagctgaatacaagttgggcttgcagaagcaaaaaatgattactattgcacagtacattggacgagtcttcttgcactttcaaaataagagagtcgtcctggcctcttataattttaagtaagtccagtacatttctcttctacatatatgccttattttagccgcgactaactgcattgtcgttaatatgtagcgatcattacatctgtttaatcatctacccgaagcacggaaccgtgacaatcttggaccctctcgattatcgtcaccagtcatacagagaatttctaacaatcttacaatagtaagtgattctgacacttgcatgtatactatgaatgtattataattaaatctcctccttaatgcgaaacgatacgaaatccatatagtgcgtacagctactacaagttcaagggtggagaacagattcgaacaagggagaagctgctagtacatacatattggccgataatactccactcacttaatgtattccaattgtttcactaattgcaaaatttaactattttcttctacgatatatcatgaagtgtcacaagcaacctagaggcactgtcctctatgggtattacgcgtgcgaattcctcagggttaatgggaggtacatggttaacgcagaggatgcaagtttctacactatggactagacaacttcacatatagatgatactaatatattgtgtttcttcaatgcatgcagttgccaagaatagaacatcgaacaagctttgatgatacatgcatcataaatatctagcgcgatctttgccacttcatccactgtgagtgttgtcatgtgaaaggagagttcttcgacccagagggtgccctagctacaagtaacgaatacaagcatcttctggagtggagcaatgctatgccaaaatataattagatagcgtatttcaagtgagaatgtaaaaaaaaaatattgtaatattttgtcaacacttttcacttatgcaatatatgtagatttctaagtatcaaaagcttgttatttactaatattattcctgcatcaatttcaattaaataattgaaaactaatttataggcaaattattattgtatcaaattttaaaatttttaacctaccttcgcaggcggtaatttgttattttttgcaggcggccgttatctatttttgcagacgggtctagctacactccgtttgggaaaattatcttcccaggcggaccgccaacccgcctgcgaagatcggcgatctttgcagtcgttgggctacaggcggacggcgaccggcgaaaatgtttttctagtactggaggttaccacattctatgcaaacgattctaaatactcaagtttaaatccaagtaattaaggccatggcatctcaacgccaattttttcatgcaatcaactaggccggagctatattttttttggatgatttgttattccatctacctaccatctaccatgtagcaatttaccgaaaggagaagaaaaatgtacagtacttgtgtgccgtgctctgtatggcctggaatgaagaaattttaccttttgatggttttggagcacttgtagcattcaagatcaaatactcccctcgttttaggttataagacgttttgactttagtcaaagtcaaactgctttaactttgctcaagtttgtggagaaaagtagtaacattttcaacccaagacaaatttattatgaaaatacattcaattattgatttgatgaaactaatttagtattataaatattactatatttgtttataaatttagtcaaatttaaaatagtttgaatttgaccaaagtcaaaatgtcttttaactgaaacggagggagtagctagctgtgctcatagggtgaagggagttagttcttctgatgtttcagcactgacagtgttgtgtagagaacggcaattttgttgctgttagccttatttgttttgtggtgggatagcacggtgcaccggctacagctaagaaaggatggaagtttgggctattttctggcgttgttcggcccccaactgtttcatttctagatcgagaaatagaatgaaaaaccatcgaatacccactgcaacatttcaaatataactaatcaaacatcatagtacatgcactgaaacatcaaaaaattcaagatgaaaacctagatctacctcttcctccactccagtggttagcaaccacttccgcgtcgatgtcgtgacgagctccaccgcatccacgtatccaccatcatcgatgctgcatgaatgtgacgccccacactttccgaggccgggccctctctacatctggtagctttcctaggaaagtgcgcacctggaaagaatttcctgatcggtcacccatccctaaattgctctaggccaagcatgcttaacctcagagttctttagagatcggcttccagaaaagaagttgcaacttgttgatatgagtattctattaatcctattaagccctgggctgggatatcacaatgaagctcggtcgtcgtgttccacagctcccgagctcccaagttccaggcgatggggcagcagcacggagagaggagaggacgacgggtggcagtgccagaagtggctacgacgggtggcggcgccagatgcggtgatttggcaatgacgcagaggaaggataggaagaagggcggtggcgccaccagatgcgagtgccaaatacggatgcgcgcgcgcgagagagagagagagcgaagagagaagaagaagagagagagaggatgaggaaatgagtggtcggttcgccttgtgttggtcgcttgataatgagcattttcgtacttttttcattgattggttttgctaaaacaaacacaataattttatccccatccaaaataaaatctgatagttaatatatttgggtgttttaaaaatattcgatattgctaaaaaaatgtttaagatatctgatgtggctttgagatgcgtgttgattggtatcttttaaatgatcggtttcattaaaataacccgtttatttaggaccatccaatgtcctttgagattcgtggtgagcgggagaaataaaatggcactggtgcactaaccctttttagtcccggtttataaccccctataatcctaggtagcaaaccgggactatgaatccgggactaaagattgctatctttagtcccggttgaaatacccgggagtaaagatgcatctttagtcaccaaccggaactaaagatacaaccatctatgtttttttttcttttttttcctcctttgatttttccctttttttctccattcatattgattcacaacacatatcacaaattcatccacaacatcacaaattcattcatacagatcatcacaaattcattcacaacacatcatcacaaatttattcacataaacattctcatacatattcacaaatcaacaacatccacaaatcatcaaaaattcaagaaaaactcaaacaaatcctctcatcccgccgcctcccctccggccgaatctggtggaggggagggcgaggccgccgccacacgcccggccgtcggtggccggcctccatcctgccgctggccagcctccatcccgtcaccccacgcccggccgccgtcggccggcctccatcccgccgccccccggaggaaggggaggaggagatggggtgagagaagaaggaaggggaggatgggaggaggagagaagaagataaggatggaggatggctggatgggagagaaggagataaggatggaggatgggagaggacttgcatgcgcgtgcggatagagcctttttttcccggttgtttaacaaccaggactaaaaataaatttttagtgggactaaagatagtagaggggtctgacacctcctgccatttattaaacccggactaataatacctaccgggactaaagatcaaaaagtacgcctgggcttttgaaccgggacgaaaaatgatttttagtcacgattttttgagcaattgggactattgtggtttttggcctaccgagtaaagatggtttctctagtagtgttccaagtggatacttctatttttcaagttgttatgtcaatcaacaaatcacttttattttaggctgataaactattatcattagacgacattcacaaatcaaggggctcctcatcctcatcaccaccaggctcatgactatttaaaacaaatcgatgtctctcctgtggaaaatctaattattgtattctggtgttttcttatctattacatcggccctctcgtagggtatatataggagtacgtaggggatagagacttggagtacaatacaagtaagagtagatttatctctaggattctatctctaggactctatcttatctctaggattctatctctaggatatatcttatctctataatttgtatttgactcttatctctaactaacatattatacttctaacattccccctcagtcgtaacgggagcgaagcgaacgattgcaactggatttaaaatcttctatttcttcatctccttcgactcaccatcattgattgcatctctgatggacggtcctctccttccaagtgggatataaactaaacaatgtttttaaaagagaaaaaaaactgaacaatccatgtccttatcaaacacaaaagaatgatggtggaaatggagagtattggctatcataaataataagagtcaatggccaattgttgtttttggagagaatctgcaagtagccatgtgataaatgccagattgatgcttgggacgtcatcaggcagacatcaaacaccgaagtatactcctggtacgtcatgaggcagacatgataaatgaatataattatactttgttgcatcgagcttggtacaaagagagttatgggggactcggggccaatctgaagtctgaacttatacagccagcattatacccaacaaacactcaaaggcagttaaacccagctgccagccgatatcatagtgcgagtggaatctataatttgtttggttgttagattacgtttaatactttaaatgtgtgtccgtatatccgtatttttgccgtgtcatatcggatatacggacacacatttgaagtattaaacgtagtctaataacaaaacaaattgtagattccgcctgtaaactgcgagacgaatttattaagcctaattaatccgttattaacaaatgtttactgtagcaccacattgtcaaatcatgaagttattaggcttaaaagattcgtctcgcaatttacacgcaatctgtgtaattagtttttttatatttaatacctaatgcatgtgtccaaacattcgatgtgactgggtgaaaaaacttgtcaggggatctaaacatccctaaaaacacagttttagcattgcactaatttcatcaaattcatgtgcctttgtttcttagtccaaccaaattttatattggtgtgtgatgaattattatgtttagctagtgcaacattatgctctagaaatgttttcaagttggaaaaaaattcccactgagaacttatttctctactcgccaaattgtttggacttaaattgttcacgcacactcctcaattaacatattatgtaatcactttgcttttttattggtttattatccaagaaaaacttaagacaatcatatatggttatgccatttttcgatgatcactgttgtttaataagttgggccccatcatgttaaaatccattctccgccactagtttttttaatacatttctgataatattgatgaacatataataattatcatcaattagtatgaaattaggtatcgtgatggttaaatatatcacctttgctgttataataaaaaaatagccgttaatgcctacatttcattagagatcatgaaaagatcagtacaggcctgcctactcctcacctattctgagaagataaataaatctctacagtaaacctctctcactgatacatgtgtcatcttttaaaaatcattactccctacatgccaaaatataaggcacaaccattttttttctcatgtcttataatataaggcctgtatgtatgcatatattaaatatttattttaattcctgtaccattaagttttctaattatattgtttgcatgcatatatgtgattcaatcgaggaggtgattgtaggatcgaaacacaagaactaagccaaccagagagagttgaatggttggtatactcaaaaacccaaactttttgcagaattagaagttaccctcaaattcgacggatcgcggtctgaccaaagtagttgcaccggtctgaccgcctggaagcagttggtctgaccgaggtaataacaccggtcgaaccgctgagatcaactcctgtcgcctgaagtcgcctgatgccgtcgccggtctgaccaccgcttcttcgccggtctaaccgccgtggtgtcgccggtctaaccgccgacgacttgctggttagaccgccgaacccgagaaaacacaaattgaagaactcttaacgtagatgataactttattactcctctttatatttacaaagtgcaacaacaacactcctcacgaaaatcttgactaaactcgaaaccctaattaactattaactcaatgctctcaaaagcgataccgggaagcctcacgctccctctctatttatacataaggtaggcagcctaaagccacaaaccaaactcatactagaagtcctaatccacctaggaaaccttcctgtacaagaaacaaactttacaaactccaatcattccaaattcggactccttccaaattcgattccgcatcccatatgcacacaatacctccatcgtatgccatatgtaatcttcaccaaccacgtgcattgaactctagcttaagtatcccgcatgatatctgaccgtcacggacgtcgccttatccccaagtcgactcccgatccatcaccggcaatactctcccgaggcatcaagtcacctacacatgaatcaaacaaagaaaccatattctgagaccaaggtatctccaacttgacttattgttatcaaacaacagtattacatacgcctcaaccctctgtccagcctaagcccgagttggtcggataggagtgagagggagggagagaggagagagaggagaaggaggagccgaggaatgcgcatgcactcttgtcactggcgctgctcccttgctaacgctggtcgtcaccgaccggtaggaaaagagataggggacagagagggagtggatgtgtggaggagaagagatgggagtagatgagaggatgatggacattgacttttaagctgagggtgagagaaaattgagatgtgattttctaacgcgggtgaaaatcgaggcgtatacctgcatgcggcatcttaatatagtcgcttgtaaaaataaacgtatttacactagcggctatgtttagagacctgtttataaaaattgattttcacatgcgggtcttactagacaaccctgaaatgtttttgcatgcaggttttcttatagtctgtttgtaaaaataaacagggtaggtctgcaaagataattatgtattagtgtgccacttcctcagaagttaaagaattcaagttgtatatattgtaggagggacattttctttagctttactccaaattacgtcgccagaggggcataacccactgatacatgcggaaaaaaaagtcccactgaagctgccttgttccattcttccgccccagggatatgatacaaggaaatataacagcaaggtgagttgaaagtaggacatccagataatactagtgcagtttattccatattatatacacatttaaaaatatgagtgacatagatggccccgttgagaatttactagtttagtgtttgtttgaccgttacaattatacggtactgacgagccatgccctactagtctagactctagagcccatatagttatagatctaattgccgagcaaagatgataccaaaatatgatgcaactaagccctacaatgatatagatggccccgttgagaatttgctattcaaatgagtagccatgcatgtcattgtccagcaaaatcaagtcaattatagagaaggcagtaggcgcgtgtgttccttatgagtccctatctccaactttgctcgaaatagacattggcaataatattaaatagtaagggggtgtttagattctaccctaaaattttataccctgtcacatcgaacgtttgagcacctgtatgaagtattaaatataggctaaaaaaataactaattgtacagtaaacatacgctaatgacggtttaattaggcttaataaattcgtctcacggtttactatcggattctataattagtttttttattagtgccccaacaccccatgcgataccctatataatatctaatgtgacacgtcaaaactttacacctatagatctaaacacaccctaagctctacttgactccaaatgacatgtcttaatttattctacttcttcctatagttggccccaggatgatatgccgaaatgcaatagcgacagtgattcgaagtcgatcagcttcattcataaaggggcaaaccatgggcaactcaatctcccgtctatatcgtactagtacacatcccggcagaataactgcaaggttttaatttcaagcctaatttattagtgagttctggacactttgagaattttgtatttcatgaacactgacctggtcgtgaattagtgatcataatcgatcgacatatatcgcataaggactttgcagcaacactgaaggtttctttactagcggtcaaatttgttggtccacatttgaggaaaaatatttctcaggaactaaaacaccaagggagatataatgccaatattaattggaagatgtaaggcagtccgacaattagtgtagtttacccatacttgttacgcatatccaaaaaggcaatcagggtgtgtttagttctttgggtacgtgtaaagtttttaaagtatatgagcacatatttgaagcctaattaatcgtagactaataacaaaacaaattacagattccgcctgtaaactgctaaacaaatttattaagcctaattaatccgtcattaacaaatatttactgtagcatcacattgtcaaatcatggtgtaattaggctcaaaagattcgtctcgcaatttacatacaaactgtgcaattggtttgtttttcccacatttagtgccccacgcatatatatgtccaaacatttgatgtgatgtttttggccataattttttgatctaaacaaggcctcaataactagatagagccctggtactttagtactccctccgtaattcatgatgttttggacaaggttaagattaaacttttgtaactttaagtatcagtaactttaaaaatgtttagtgaactaaacgatctggaataacatatatagatttatctttcaaagtactatataaaaaagtagacatacacatttatttattgtatatattatagtataaaaacaaagtcaaacatatagttgaagactgtgtcattgtccaaaacatcaagaactatggaaccggagggagtacactgtaatttttttttactagggactatctatacatttctcttggaaatttgtcaaatgtaaatatagtacaatagtaatgtaattacattataacttattacatgtaattacaacgtaattgatatgtaactttcatgtgattttgaaaccattagatttgctttaagatctgtgcaagtgaagaagcaaaaatcaaaacgcacacacaagtaagagggtttggtatcatgacctccgcttcgtgaaaatagcatgttatcacaagatttttataaagttacatgcaagttacaatataattacactacgattacactgtttacatctgtcaactttttaggagatagtttgtcgacaaatgtataacaaaactgttttttctattttcaagtgctgagttaagttcttggttttcatattgaaacacctaggtgggattgtcctacgcaaattgctaagaatagaattagattcgatatacttaaattctgttttaagatacaattgtattttctactatatatatttttaaaataaatttgaatatcatatacaactcctagctcatgttactatatgtacaattatatcgatcaatctacactgttataattttgatcatcacggtttaatggattaaatattttcttcttctttaattaactataaaaaatgcccatgcattgcaatgggtacagacgttttctaagtgatacaatagctattaggaattgagcaataaattgaaacattggcctcctctcgctgccaagccacaccctcgcgtttcagtagcgtctttaacctctgaataagagtcccatgcccctatgatgcttgaaccgatcctgcacatcaaatccggctaaatctcttttgatctccaaaaattgtttgagggcttttgatccattcaatctcctctttctatttccccaaaaattgatgcgaatccatagaactcgagaaaaaagggcccacggaagctcactggctaaccatcattgacgaccattataaatgaagattaaatctggcccataaaagctgaattgaaagggaaaatcatgggaaaatgatgagggatgagtgtggaatcgttatttgcaattaatttgaagaggaaacgcacggggaggtagatcaacgtggcggtggcactaggttcggcctgagtggcggctgaaggcgcgtgaagcacgcagtcagtggatcggactcataaaaatatacggaatccttgtaaaaaatacggaagaagattcaagagggagagaaaaagggaaaaagatcaagagggagagagattgtggccagggagggagagaaaaacagaactggaccggctgagagacaatgacagacgaaaaaggttacggaagcaaagccttacgtattttttaattaggtatagacatagatgtgggaatttctagtctccgtagaaaatatggtggcttctttttaagatattttaaataatataataatccctatatataataaatagatagattgataccaccacttaactatactgattttgacaagaggataggaggaaggatctaattaacccgagaccttgtgagccagtagctgtgtagcacattcaacaatctaatctaagcacatctttctaataattacatgcaatttcaatttagttacactagaattatagtatatatatagttataatttctttatcgaaagatctatagctaattcctaatatagtaacttcaaaatctgcccactgtgccaccaaaagccactaagaataatttaatccaaatccaaacatttctgtcgtgtcgctttttctcgtcgcatgttgaggctaagctcttttcaaattagtacttgattgttcaaacaaattgttataatttttttaccgggagttctatagctaattctttaagtaatctagtacaacttcaaaatttacccactgtgccaccaaaaagccactaaaagtaatttaatccaaatccaaacatttatatcatgtcactctttctctccacgtgttgaggcttagttcttttcaaattatttacttgattgttaaaacgaactagaatgtaacccgtgcattcacgcgggcatgtatatcataagctgcatttgagaaacttataaggattgaatattaaacatgtagcacttgccaagcttcagaagtacgttttatttcataaatttatttgtcggcatttcttaaataagttttctttggtatttgttatctttatactacgcaatatttaattcatccatataattaattaattattactttctgcttcataatttaaaaataaggtagacttattttgtttacaaaaaaaatgtctaacaaattaagttcaaattaaaagtaaggtgttttttttgttttaaattgaatgttttggggcttcttttttacaaatctcgaaaaactattattcttaataatgtaccatcaagctagcactccttttaattggttcacattaacgcaatttgttatatgtatctacatatggatcaataaagatataatagatgtatgtattctgatcttgtttccagaagacatgcatatgtacatacaacatgaggaggggagaagttttgtttcctttgagatagatccaatggttttaccaatttgagttttctatatttataaaataataatgacccaaagtaacatacttgttaaatatctattttctaattaaattgcttattattataacattataaattgactttatgtgttgcatattgttctattaaaagctatgtgttgttaaatagatcattaaagtatctatatgatttttcatataaatgtgttttagttcttttacttattaaatatagcgtttgggtgttgaattataaattttgttgtaaataatctaatgatgaacgtggtaaaacattggctatatgatttagatcgtataattgtttggaatttattatcacaaaatatattttcatgaagagtagtaggggaggaggtatggcatacatacgtgcactggtgcatgtaacttgtgggccttttcgttttgttagctttttcttattaaggtaaatccaatggtggaaaatagtgggtccactgtatttaaagtaaaatcaatggttagattttttgagaattattaggaattcctctaatttattagaatgccacgtggtgacttaggagtgtttgtaggagtcacatgtggtggcttgagagcgtttatagaaaatttaatggacttttagtatataataattaggaaggtaacctgcacacatgcgcgagcaccttatttaatgttgcttgtattttaattatgaatatttatgtatggatgagtatttcttaaaatattttttactttattatgaacatgtttttatcaataatttgtatgagattgtatttttaatgcatgaattctcatatataactttagtatggtttatgttccctaattaaccaaacttagtatgtacaaaatacccacacaccatacgtatttaatagaaatcaaggggggaagaacatgacgtgtactccatctgttattttacttcttatttagggtgtagtctacaaaatgtagaatttacacatgatttggtaaatagaattggcattttagattatccccgtatagtctggatagattggaatccacatgataacaatatttatagagataatctaagaaatgccattgacaagcgttcaagtcccagaaatgccatcgacaagtgtgagttccaagaaatgccatcgtataaacgattttgtcccaaaaataccattgccattaggatttcgtccattttgtgctattaaatacactgttcatcctatagaacttaacggcaaagaatagatggaaccctaacggcgatggtatttttgggacaaagtcgtttgtatgatggcatttcttataactcacacttgtcgatggcatttttgggatttggacgcttgttaatggcatttcttggattatctcatatttatatgatcatataatctatattgttaatttttatcatgatttgtcataattctcaattgccatgcaaggccccggatgtgacctgctacttgttgcattgtaaatctaatttagtcgtgcatatttgtgaactgatatgggccgaatatagtgcaccctacatagtcgcatatttatgtgatgattttacccatatcattgaattgttttctcaaatgccatgtaaaacgcaaagatatgacatgtttcttgttgatattgtaaatctaatttagtggtacatatttttataaccgataaagaatatatagtgatatatagtctatattgtcatcttttttataattttcatgtccgtttggactacagaaaaagaatgaaaatatgacctaaaatataattttactttacagattaaagtatggttaatatagatcataaattaagttaatggtaaataatataatatactaataaactttattttcaaacgtcttagagttagttttagtatttatgattataacgtgatctatgacactataacctttgttttcgttttttttttctgttagacataacgcaaagggtcaaatcgatcatggataaaaataatatttatttttttctaaataaaaatatagtaaatatggattgatttaattgtggtcgaataaaaaaattgtatatataattgaaaagttacaatagtttatttattatttatatactacatgttatctcaaccaatatatggaaaaaatgagttaagaagagggaagagggggtccacattatctgcaattagtgagtgtggctggttagttacgtatggtggaacttaattgcccacgcctaggttcaagacctagacttcacatgggtctcatatttacggctaattatttttgaagtaggcgacgttcccatcgatagcgaggcgtttatggtgatttcgttaatttgaagatatatcattagctcagtctctcgaatatgttttctatggataattgtacgcgtgtgtatatgagcgcttgtgtttatactatgtttcttaaaagaagttggcatgcattacccttccaaaataattatataaaatatcaattaacaaatttctggtggcaaagcacgcactatcaggacgcctcgactaagtactcaaaaatcaaccgacagcacccaaatacctgacaatagtgaatatattgtccaagaggcaagagctttgatatatcactttgttgatgaacaacttcaccaaggagtagtataaaaagcgaaattatatgcttaaataaaccgagaagtggaagttgcttgcatcattctcctgtttgatacgattaggattatttctcccttggttgttgcttcttgttcctaaaaaaatgtagatgtatgtcgtcgatattggtcgaaaaagtgagctagaggcgcattgcttttttttccctatggctttgcatctgaaaatttacttgttgattttttcgggagagaaataattgattctctgcgtttgtttactcctaattaattattttggtgggaccaaagcatgcaaccatcatatattagggaggagagaagataatttaatctagtgagaaattcatcaggccctgagggcaatattcatgaatctgaccctaaatctgtataaatagtttagaacagtcagtgatattcacttttgtaatcaaacagatacaggaaaaattcagaaactaactaccgagggcaatattcatgaatcggaacctaaatctgtaaatagtttagaacagttagtgatattcacttttttgacgcaaaggtgatattcacttaaaaagtgttcgttgttttatttatttttggatgatggaagcacacacccaggctcctgcattaaatgataaatccacaacgtcggttttctttccaagaattaattctgcggtatttttttcgggagagaaaacaactgattctctacatatgtttactcgtagttaattattttggtgggaccaaagcatttaaccatcatatattagggtggagagatgagaatttaatctaatggtcaaaattgatgggtccaccgaattaagtgaaaatcaatagttacatgcttatccaatttattagagtatcacttgatagcttgggaacgtttctagaagtgtcatgtgtcgacgtagaagcttttttaggatgtttcatggacttttaatatataatagatagatagatagatagatagatagatagatagatagatagatagataggtagattattgcttcatatgcttcagaaaatatattttcccaataaactttcttgttaagtcctattgtattgcttagccacttctgttagattatttattaactttatttattatagtatctaatttattcttatataatcaaaaagataatccggaaaaagtacagttcctcaataattaactcgttacaacctagcctatagcaggagagccgccggggagcggcggcgccggcgccgccatccttccagtcatatgcacgcgtcgaaagctcccgtcgcaagaggaatggaaagtttaaccgacaagcatacatgcaattagttgctccatcaactttaatgatcaccaaattcaattccatctctacttggttagcttgacagttacaagtaccaaatacccccgtaggatttgactgcacggaaggagaagtaaaatgacggatgatcgatctggaaattaactacagattaattgaccgggatcaaataatttcattagcatgattaaattaggggcagttcctgatatattaacttgcaattcttttatacgttcgtgaaaaaaaaattagggacagtccgtccaagatcgagcaatcgatcgatcattgagcgttcgtgcttgattgatcaatttggcacagctggtttacgaccaaagctagcttgttcatgcatgccgatgactgggcggcggctgggcaccggcggcgaggcggcgggcttcggtgtgctgcgatatgcgttggtgatcgacatgagcgcttcggtgtccggctgtcagcatcggcattacgttgcgcattaactggaacagaataaaagtttatgctgggggaagtttctagctagcagttgtatttttcaacagaattttcagtttctcaaacagtctgtattcatatacaaatttattgacacaaaatttatcgtacacatagaggcctgagagatttggttagctgtagtacatgttctgtcaatcagggttcagggcatgttagttagtttgatcctacaactaacaagatatatatgtcagggttatggataccacatacctaatagtaatcgactaaactcggcggggcccaccacataccaagtcttatacggaaacaatcctcgtatattgaaggagttccggataatgaaggacgagtaaagttctatatggaaacgataagaactaatcagattatatccatactggtctccctagtttacttggacaagggggcatctatgggtataaatacaagtccctctagaggagaggagagacatccaccacagtctacgaagccacaagacacaacatacacacaagccaatacgccgccagagatcgatgttagagataagcctagacataccctatccggtgtctacggaggctggcaagagggatctagcgtcatctctgatcccgacgagttcatattcaagaaggaagactatgttgtcgtcgactacgagttggttatctagccgccaagtcgatgacagctagatagattatcataattattgtacttgtgagattcagatgaataagaacaacaacggcttcggccaacaggagtagggctattacctgtcagataaggggcccgaacctgtataaaaatcgttgtctccatctcttttacctcaatctcgcacatacactggtaccaacgatccacatactatgcaaatatcataatcgcgatatcaaacgtcgacaatatataaagattagatcgtggggcagattggccaaaaggtctatatataatcatgtgtctagccgatgcggatggaattttggatcgatcggctataaccgatgggatataagttatgaaaaataaagcaaagaatacattagccaagatttggatgtgatataattttgaatcttctaactctattaaaactaatcttaatagatcggatcaaacagatattataagtataagattgataattataagatattaattaaacaattatatgatctttgaatatgggccgatgcactggattgattgaaacttgttattaacttttttatttctttatttttaatttctctgttttatacttagattcctttcttaaatttctatacttttcctatcctataatctaaacaagccttagcctcttcttcccccccacaaaaaaccaccacctcgaggatttcattctgatgggaaaaatttatgaggtgaatcattattttcctgtgagttttgtctcaccctcaagaaagattagtgatctggtcatatattaacaaaaataaaggaaccaaacttacactttgtcatgtgcttcacacgataggaatgacataaaaaggtatgaaccgctaaacttatcttttacatgactcatcgcagatgtggagctgcagtttttaactttggattctttttagagcaaaagaaacatgcacccaaggttacaaagaaaccaacaagataatgtgcatttatctggaacaacttctactaatttcttatgaaccaagtaaatgcacatcatctgtatctacactacttaaaggctgtagtgcccctatgtatcacagatttctattttattcatgtagaagcattggagatagtttgacttagagttttatatcacttctttcattggatatagctagtcttcacatatttgctatgttgactagtgaggttcctagccctagggaccctgaacttgttgagcgtcttattcttgatctgctagatccaggacatctggacatgctctttccgagctgcgcaaagtaatttatatcttttgtgggaattgtctattacatcattccttttatttgaagaagtggactgggctgtaagttgcgtaaaattaacttgatttactaatatactaatgtgttgttttccaccaaataaaagtgatatgtgtaacacacatacatgaataaatgacagttgaaaacagatgatgcacctttttgcatttcattatttcttattgcagatttgtgcacgaaaggaattatctaatgatgctatatgagatatattctaaacatatatactattagttttcccctcaatttttaaataaatatgtataaaattaaattaaatttgtcgataatatgcaatatttaagtaaatatttggacaatatgtggcatggcatgcattgatgtgacaatattaccgcaaatgcctattaacctaaccaatacaatagtaaggcccctttggtaggtttggatatttttcataaagattattagactactacacagtatcaggcattctaactacaagaattgtggttgaggcgataaattgtctaagggaacaggaggggtgtgtaggagaggggggagaggggagggaggaggagggtgagtgtttgaagttcacatgattcatgtttccactggtcgcttgaaattaaatagggagaggggtaggtgtagggaattactctagttgcttctacatacaggtagaggtggaatggcttttggaaaaccgaccaaaagttgtttttcttgggttttggcatttgcacgtttaaaagatgctaggttgagaaaaagtgtgcacaactcagaagatctacgtggaataggcttaactgcaatatagacaattatgtaaagtaaaccaaaatacatccaaaatcttattggaacagactttattcacattgcaacgtcccttgttcttacatgaagacaaagctatctacgataaaaaggcatgtgcattgcatacatacttctaaaaggtacaaactaaacaaaaaaaagcataaggaaaggggaactttcccgtggaagagccaaaagagaatgaaccaaactaaggaggatctcaatatcaaactagtagagaagaaataagcaaataggttgattccaacataacatagagattgaatgttgagggtgtgtgcacacacatctcccaccaagcgtgctaagcttcatgccttcccttaaagagcaagactattaggaaataatgatacatgttaccaatgaaactaagacctagaaatttatacaagcatacatctatatgaaacaaaaagaacactttattttcctccatagcacactcctctctcatggtctcacattcatccccgtgtgaggaggtaggcactaaagttggtgtcatcaggggcggagcccccgcccaactagcccaggcagccgctcgggctcaccggtgaaaagtccattaaattttaatattattgaataaattgatgatgaaatttctgtagcaaatgatagttatagtgatgtttgcctgggctcaaaaatctttcttgctccgacattgggtgtcatcgagtagtgagcgaaggatcaaaacatgacattagcagagaaacttgtcctcaacctttccaatcctaatctatgtgagaaagcacaccttgaggtctcaaagggttgatagatctccttaccctaagatattagttaatttctaattgcctggttgattatttttgtaattgttcttaattgaataagtaattgtaaatcgcatattctacaattgacattacaacatcatggaaggaaaaacctatgaataatgaagcttcttgaaactatttttctgaaaagagagatgtttcaaaacctggctctgctgttgtggaattcttttggcacagttgcttcactgctccaggtatgatcatgcttgatcccacaagtaattagtaatttttgctgtgttgtactatgtacgtgttcagttttttttttgaggtcttctccaaaaaggtggttttgatgtcagccactcttagtaattgtcacaccctaaaattcccatatatataaattgttgtttaattagaattattagaattgattttaaaagcctagaagagaagatctaattttaaataataaattccaatataaaattgggccagataaaattttattaaatactttgcttgattctatagttcctagatttttctaggatttatttgagccaaggaagtatttttaataaatggaattgcatttcatgaataatttaaattggaaaagttttaaaaagtcttcttttggctttgggccgaaagtcggcccaaacctctctctctcccggcccaggtcggcccgcagccgagcgccgcccgcgcgcgcgcgccctcgctcgctgacaggtggggcccacctagccccacctatcagactcgtcgtcttcctcgcgccgtcgcccgaccgaaccctaaccgagccgcgccgccgtctccttccaaattcgttcatccctttccttctccggtgaaattgatagaggggaaatgatctccgagatcccctctaccttttctcttttggaatcattggctaaaatcgtttggaaacccgtggattcgatctcgaatcggattcgtctctctctctgaaccctaacctttcctttgcgccgccggccgccgtgggccttcgccgccgccccttagccgctttaaaaggacccccggtgtctcctctacccgccgccaccctcgctttcgtctctcattgtcggtagagccctagcgccgtgtagcctagcgccgccgtcaccgctgttcgtccagccatgtgccacagtcgctccggtcatcgtcgtcgctcgggaaggccgtcgtcctgatcgtcatctcgtcgccgtcctcgtccgcccctccgtcgtcgctgtagatcgccggagccccgccgtcgtcgtcaagccgaaggtcgccgccgtttcttcctcgtcgccgtcgccgtccgttgaccatccgcagccgttttggtcaccggtgagttcaccgcgtcgcccgcaacccgtaggtgtccttcgttcacgccgccgcgccgtcgttcgccggcgagcacgcgaggccgagccgccgtcggtgatgacatcaccgctgacgtcatcgacgccgtccgccgtagaccggtcgtagaccgttagatcttggccgtccgttttggatagatcgatctcggccattcgtttccgtgaaccgccgctgtgcacccggtccaccgtgagccgagcccgctgacgcaataatctccttttccttttaaaaaataattcattattgcgtcataattccattaaaatctatataaatgatttaatgcgatttaatctttaaaaattcataactaattcatcttagctcggatttagttggttcaagtctctaaatttttctaaaattgagatctacatgttaaaaatatccacatgtattgttcatgcttgtttatgtgctgttttggtgattttgttcttttctctttagattccaacgttcccggagagtccgaatttgcaggagaatattttgaggaatttcaaggccagcaaggcaagtcacacagatcccaaacaaccctttaagcatgttgatcccgtttaaagctattgtttctattcaactactgcatttattttcgaatgtcattgggtggaattaacctattgccttgttatagcccttttgttcttgattactctattccttgatacctagggttattataacttgactagttgagctttatatatgggttcagctggatattagatataatttcttagccatgcttagtaacattagcacactactgggataacttgtgcttcactattatttaatgatggcttaatgatacctcatgatggttaatcatgattggttaattaattaatttgccaactaaaacctgataatggtgggttgtgacatatggttttgatggttgtgctcatgaaaattaaggaccggttcacgattttcggttgtgaaacatttaccgtgccaaccacaagccagcgtgggcaacggctttactttctgtatagtatggttcttagtagagcaccagactgtgaagtggtggagataagcccacgggagtcactggggagtccataccttgtttacaagggggtgattatgatccgggaacggtgcactgctgtgaattgtattatatagagggtattgttacaatctctattcaggtacttgtcaagtatcgcaacgcatggttgacatgatgttgaggttgtgtcttgtgggtacagtggtacacctctggccagagttcaaactattcgaatagctgtgcccgcggttatgggcgggtctaacaatgtctttcatgtttagtttcacacttctcaccatattaaatgatgctgttaataacttgatagctcctggtttggaatagtatattcctggtttggagatagaactgtgcagccgggattggttgttcagaatggttgggcctatgcaacagggtatgttgtatagcgttggattaatactgtttaattaatattctactgttttattaaattctgaaatatttattaaatgctgtttatgcaaatgagactatactatgccatcctttgttatcctgtgcacttgcatatttgctgcgtggcttgctgagtatgtcatatactcaccttacaatcattcatcagaggaggagtttacagtgatgctgatggtgtggatgattaggcgtagccctggtcaagctgcctatggagtggagtcgtctgcgctgtttcctttattttccgctgcttagaactttattgattgaaaggaactatctacctctgtaatgacattttattcgcttattaattagagtaataattgtactctattatcaatttgttattgtgtgcctcggctgattcttggatgagggtttacacacatgtaagcgtttggaattttggacagaaattccgggcgtgacaagttggtatcagagcctccttgaccctaggttatgccaaatggttacccctagaagccctctaaaaatattggaaaagtagaactgttctcctctctttctctttaaattaaaccaaactaatggcacatgcagttcatgatctctttaattgttctaattcaaaatttatttattattccggtgttgttagtactgtacatctattactgtgctaatggcccatttaccaacaaaagttgttaccacattgttttatttaatcttgctgcaatggaataaacttagcatgttgatttgttcaggagttgcgtacgatgtccttcctcataggatttgagactgcccctttgtatgcccagattcctcatgatcgtgatgaagagaagtgtcgtgtcaaagtcaccttgaacagtaatcgtgaagatatcccatcggtgatgttcgaggctggagagggaagctacaatcatgcttgttaggaggtggcaaggatcgccataggagagctccgcgaaagctacaatgatcggttggccgacaccgagtaccgctaccatcctcgtcaaccccagggaagtgaccgtggcagttaccttgaacctgcagggattgagaatgatgctaccacaaggcatttggttgagatgctgtgggccatggatgagacccgcgctaaaattgtgatagcagctcaagatcgtgaagaccggaatcgcggaaagatttgcaagctggaggacaaggtggatcgtttggagaaggagctagccgcattaaaaggagaagcgccaccgcagaaggccagggttcgtcttaccgcaaggaagagagctctatttgtccctcgctaccagttggcgccaaaggttcgtgtggtggaaaaagaagctaccccagccccagtggatcctccggtcgtcaacgtaagtgatgatgatgaagaagaatccaagcgcacccattccaaggtcgagtggggagcaactcaagatgatggggacgcgccgaaagagccttcaatcaactcagatgtccggaagaccttgaacgccttgtcaagtcgttgtcttagatcgttgtgttagttagtttgtttaagtttggttgtgtgtgtgggtcatgcatgtgatttacatcattggggggatgtaaatgcgtgcctttgtttgctttcgagtattaggaagtcttcagttttgtaataataaaacttagttaagatcaataaaagttaagttagtaaaattaattccctgtcgtaagtagattttcccctgtttctcttcttgtgctcctatctatgccagatggtgcttactcgcagcaacgggaatggccccaaccccaacaacaacaacaacaatgcagagaatcccacgcttgctcaagtcctggctcaacaggcacagcttatgaatctgatgatgcagcaactccagaaccagcagaaccagggaaacaaccatgcacctcccccgaataagctggcagaatttcttcgcgtgaggccgcctactttctctagcaccaccaatcctgttgaagctggtgattgcctgcacgccatagagaagaagttggacctgcttcagtgcacagatcaagagaaggtttcttttgcttcacaccagctgcatggccctgcctctgagtggtgggatcacttccgtctcaacaggactactgctgaacctatctcttggcttgagttcaccgctgctttccggaagacgcacataccatcgggagtggtgtctctcaagaagaaggagttcagggcgctcattcagggatctcgctctgtcaccgaatacttgcatgaattcaatcgtctggcccgttgtgctccagaagatgtgcgcactgatgaagagcgtcaggagaagttcttcgaaggtctgaatgatgagctttcttacccattaatgactggggattatcatgatttccagaagttagtggataaggctattcgccaggaggacaagtacaactgcatggagcagaagaaacgccgaattgctcacttcaaggctcagcaggggaatagtcagagacagcgtcttgctatgggacctcagtcaatgctagagggaggttcttagtctgttgttcgtccgcagcgtcagttcttcaacaacaatgctggcaacaacaaccgcaaccaagctccacgtcctgttgcagctctgacatagaatcagctagccaagagggagcaaggcagcaagcccggagtgtgcttcaattgtggtgacctaggacattacgctgacaagtgtccgaagccccgccgcgcgaaggttgtccctgctcagaacaactcctccgcaccagcgacaaaggctcgtgtcaatcatgttgctgctgcagaagctcaaggtgctccagatgtgattttgggtacattccctgttaactcagttcctacaacagtgcttttcgattctggtgctacgcattcctttttatctttgagttttgcgggaaatcatgggatggaagtagaagatcttagacgtcctttgatggttagtactccgagtaaccaagcactctcatcacaacgtagcccctctgtcagaacagagattcaaggagtaccatttctggccaaccttattctgttagaatccaaagatcttgatgtcatcctaggaatggactggttagccagatataaaggtgtgatagattgtgccaatagaaaagtaactctcaccagcaatgatggtcaagttgtaactgttcatgcattgccctctgaacttttaaggtcgagtctgaaccaaataactttggaagagattcctatagtacgggagtaccccgatgtgttccctgatgatttacctggtatgccgcctaaaagggatatagaattcagaatagatctggtaccaggaacaactccgatccataagagaccttatagaatggcagccaatgaattagcagaagtcaagaggcaagtagatgatttgcttcagaaaggatacatcagaccgagttcgtctccatggggagctccagtcatctttgtggaaaagaaagatcatacccagaggatgtgtgtggactatcgtgcactaaatgatgtcactatcaagaataagtacccgctgcccagaattgatgatttatttgatcagcttaaaggtgccaccgttttctccaagatcgatcttcgatcagggtatcatcagttgaggattaaagaggaggatatacctaagacggcttttaccactaagtatgggttgtttgaatgtactgttatgtcttttggacttaccaatgcccccgctttcttcatgaacttgatgaacaaggtgtttatagaatacctagacaagttcgtggtcgtctttattgatgatattctcatctattcccgaaccaatgaagagcatgaagaacatcttcgtcttgcactagagaagctgcgagaacatcagttgtatgccaaatttagcaaatgtgaattttggttgtctgaagtgaagttccttggtcacatcatctcagccggaggagttgccgttgatcctagtaatgtggaatccgtaaccaactggaaacaaccgaagacagtttcagagattcgtagttttctgggtctcgcaggttattaccggaggttcatagagaatttttccaagattgccaagcccatgacacgactgcttcagaaagatgtgaagtacaagtggtcagaagagtgcgagcagagttttcaagagttgaaaagtcgcttaatatcagctcccattttgattttgcatgatcctaagaagggtttccaagtgtattgtgatgcatctaagcttgggttaggttgtgttctgatgcaagatgggaaggtggttgcctatgcatctcgttagttacgtccgcatgagaagaactaccctactcatgatcttgagttagctgcagtggttcatgcgttgaagatttggcgtcactatctttttggtactcgtacggaggtgtacactgatcacaaaagtttgaagtatatttttatctagtcggatctaaacatgagacaacagagatggttggaactgattaaggactatgatatgggaattcattatcacccaggaaaggccaatgttgtagcagatgctctcagcaggaaaggctattgcaatgctacggaaggacgacagttgccattgaagttatgcaaggaatttgaaagattaaatttggaaattgtcagtagaggtttcgttgcagccttagaagcgaagcccactctcattgatcaagttagagaagcccaaattaatgatcctgatattcatgagatcaagaagaatatgagaagaggaaaagctatcggtttcttggaagatgagcaaggaactgtatggttgggtgagagaatctgtgtcccagacaacaaagatttgaaagatgcaatactgaaggaagctcatgatactttatactccattcaccctggtagtactaagatgtaccaagacctcaaggaaagattttggtgggcaagtatgaagcgtgagatagcagagtatgtagctgtgtgtgatgtctgttagtgagtcgaggcagaacatcagaaacccgtaggtttgttgcagcctttgaagataccagaatggaagtgggaggaaatcggcatggatttcatcactggtctacccagaacatcatcgggccatcactctatttgggtgatagtcgacaaacttaccaaaatggctcatttcatcctggtgaggacaacatattctggaagccgtttggcggaattgtatatggcaaggattgtgtgtttgcatggtgttcctaagaaaatagtatccgatcgaagtagccagtttacttcaaagttttggaagaaactttaggaagagatgggttccaagttgaacttcagtaccgcttaccatccgcagacagacggacaaactgaaagggtaaatcagattttggaagacatgttgagagcttgtgctttagacttcggtggatgttgggataagaatctgctttacgcggaattctcgtacaacaacagttatcaagctagtcttcaaatggctccttatgaagcactgtatggtcggaagtgccgcactccgcttttgtgggatcaaatgggagaacgtcaggtttttgggactgatatcctaagggaagcagaagagaaggtaaagatcattcaagaaagattgcgtgtggctcattctcgtcataagagttatgccaacaatcgccgcagagatttaagttttgaggaaggagatcatgtgtaccttcgtgtcacgcctcttcaaggggttcatcgttttcacactaaaggaaaattggcaccgcgttttgtgggaccttataagattgtcagtagaagaggagaggtcgcttatcagttggagttacctcaatccttggcaggtgtccataatgttttccatgtgtcacagttgaaaaagtgtttaagggtacccaccgaagaagctaatctggaacagatagtggtccaagaggatctgacatatattgagaaaccaatccgtatcttagagacagatgagagaagaaccaagaatcgagttatccgtttctataaggttcaatggagtaatcactcagaggaagaatctacttgggaacgagaagatgaattaaagtcagctcatccgcatcttttcgctagttcttccaaatctcgaggacgagattctgtttaagggggtaggtttgtcacaccctaaaaatcttaaatatataaattgttgtttaattggaatcattagaaatgaattttaaaagcctagaagagaagatctaattttaaataataaattccaatataaaagtgggctagataaaattttgttaaatactttacttgattctatagtttctagatttttctgggatttatttgagccaaggaagtattttttaataaatggaattgcatttcatgaataatttaaattgaaaaagttttaaaaatcctccttttggctttgggccgaaagtcggcccaaaaaccactcctatgtggccacagcaggggcatcatcgccatttcgcatcatcaacgacgtcttcaaacggacaaagcgacggtaggggcatttctaacaaactgggcaatttggatggtacttttctactcgagctcattgcgatggtattttccaacaccaggaactttgcgatggtacgtaccaaatttgctcttcttttcggcattacctttctaggatgtggtaagtagggataagtatagggtggggagatcaataactttcaaatgacaaaaactgtagcttttttcatcaattatactgactttctgggatgtggtacgtagggataagcggataagcggagggtggagagataaattgaagtaactttgaaatgacaaaagctgtagctttctcactcatttgtactgaattaaaaaaaatgcaagataaaaaaaccataaagttaaagtaaaatgtgacacacttgctagatttcaggtttgcgctatggagttcatcagctcgtcatttttgtagatggcgaattgacaggttgaaaaaatgttgataaaaatagttgaattgcacaataaaaacatgatgtgggaaaaaaagagaacattgtatttgttttataaaaggggattgccaacttgcactttcgctagcagaacattaggatcattgaaaatggccttgaactgaaacctgtgacgagaaaaaatatttttaaaattgttacaacttaaatgggagaaaaaagttgggcaagcaacatgataagttgtgcggagaaaatagagatgaaaaaatattcaattttatactactgacagttttgtggaaacaaagctttaaattaaactagagccgttcctgcacataaatatatgacagttgtgatgtacataaatttgctaaaattgggtcacatgaaatccatgatgaacaaaacataacaaaaaaatcccataaaaaaaaggaatatgcaactaaagaaatgacaatgtgcgactcagtgattggaaactacactacatagagaagttcaaacaagggaagaacagtttatgtacacataaagtttgtagacgtaaagtttataagtcaaaagtttatatacccgactcaaattacaattcggattcaaaaaaaattttgtatagaaactttatacttgtaaactttacactaataaaaaattaaacatccgaaagtttatagtcgcagaaactttatacttacgagtattctgctttaaacactttatacttcaaaaacattataaccacaagaaattagcgggggatgtaaacaaaacatgtgtattctaaaaaaaactctatcgggcgattaataagtttaaacacctaaagtttgtatacctcgagtttacacatgtgaagtttataaacctaaagtttgtagacctaaagtttataagtcaaaagtttatatacccgattcaaattacaattcggattcaaaatatttttttatatagaaactttatacttgtaaactttacactaataaaaaattaaacatccgaaagtttatagttgcagaaacttcatacttatgagcattccgctttaaacactttatacttcgaaaacattataaacacaagaaattagcgggggatgaaaaaaaacatgtgtattctaaaaaaaccctatccggcgattagtaagtttatacacctaaagtttgtatacctcgagtttacacatctgaagtttatacacctaaagtttgtagacctaaagtttataagtcaaaagtttgtatacccgattcaaattacaattcggattcaaaaaaatttttatatagaaactttatacatgtaaactttacactaataaaaaattaaacatccaaaagtttatagtggcagaaactttatacttacgagcattctgctttaaacactttatactttgaaaatattataaacacaagaaattagcgggggatggaaacaaagacatgtgtattaaaataaaaccctctcgggcgaatagtaagtttatacacctaaagtttatacacctcgagtttacacatctgaagtttatacacctaatgtttgtagacctaaagtttataagtcaaaagtttatatacccgattcaaattacaattcggattcaaatattttttatatagaaactttatacttgtaaactttacactaataaaagtttcaacatccaaaagtttatagttgcagaaactttatacttacaaatattttgctttaaacactttatacttcgaaaatattataaacacaaggaattagcaggggatggaaacaaagacgtgtattaaaaaaaaccctatcgggcaaatagtaagtttatacacctaaagtttgtacacctcgagtttacacatctgaagtttatatacctaaagtttgtagacctaaagtttataagtcaaaagtttatatacccgattcaaattacaattcggattccaatatttttttatataggaactttatacttgtaaaatttacactaataaaagtttcaacatccaaaaatttatagttgcagaaactttatacttacaaacattctactttaaacactttatacttcgaaacattataaacacaagaaattggcaggggatagaaacaaaaacatgtgaattaaaaaaaaacctatcgggcgattagtaagtttatacactttgcttggtttaattgatccatggtatgggacattatagcggttaaagagaaacagggaaatagactagtaaaatcattatcataaaaatagtatatctccattttttttattgcagaatctgaagactgctttatttcaactctgttactttcagattctgccgagctgttatctttgcttgcagagtgctcaccagtggcatccttgcttggaacataatctgaaattgcacaatttgcctcgctacagtccgagtcttcacgataactaataccatgttcctcaaaatcatccatactgcctgagtcacgtaatggaatttgttatctgcgcaacagttacatagacaccttgagctcctgaccaactgatttattagaaatcattgatacaagcagatagcggcaaggaaatcaaaaaggttatgcaaaaaacatgaaacaatggaattcagaaaagcgccaaaaaaagatactattcatccaggagattttattccgtccaagctgttcgttctctatatgctgaaggtactctctctctctctctctctctctctctctctctctctaccccttggttttcagacacatgtatgagcatttttggtgacttggtgtagtgagaattttttatatgttgtacattatcaggacatagtagcaaaacactggatcaaaaaattgtttatatgtatggactagtcctgttagtcaccatgtcaagcaccccctgttatgtacttaccacccatcacatatactttaatactttatatttacaagcacatagtttagccaaatcacccattgtccaataaaaaacagagcaaaatcctgaaacttaattgaacatctaatcctatgaatatgagagcaaaattagttgacgaggacactagtcactactagtcataaaatatgagaatcaactgaaatgtgagaatcaaaaatcagttgatcccagaatcaactgaaatcgaatcagaaaaataaaattcactagcagtcactactggttcccccaaaaattatctagaacaaagcaaaatctgtctaagttgattgcttatgagtgctgatgaggtggcaaacatatgcatatccacagtaacaaaaaaaagagttaagctaacatgaacccacaaatggcaaatagtgagggcatatatgacaataaggcaaaaagatcaccattcagtgctagtggtcaaaaatgccaaaaagtgcagatgggccagtcaatcacaacaatatatgctcatgaaaatttttacaaaaatcatcaaaacttcgtgactacctgcaaccagactgaacttaactcagtataagaggataatgagttgatgactgcaggaatacaaacttagaaatgcagaggtgtataaatctgcagtatgtaatcaaacacaacacaagcggctgctaggttttctcagttctggatggtttaatcgtttatatttaccagcacacagtttagacaaaaaagtgcacccattgcactataaaaaacagagcgaaacactgaaactttactgaatatctaatcctacaaatacaaaaacaaaatcagttgatgaggacacctagaatcaactgaaaaaatcgagtcagaaaacaaaattcaaaaccagcccctattgggttctcccaaaaatttgtctagaacaaagcaaatctgcgcacaatcgtttcaggggaaaaaactaactgcatatggaggaacgcaaaatagtacatttctgacaaaaaactcagtacaccaagttaatgcacaaagatgtttttgctcctattaaatcctctgtagttttttctctgaaaatctcactcaagtatgaatgttattagaaagcaacaactatatgatgacacctacaaaatcagattgcagcaatccatgcatcatgtgaaagcctcatgataataccaggtcaagcagggcatggagatagaaaaatttctctgtgaataacttgaatcatgctggcaaaataacttgagatatgtagtatttcaggagccaaatatgctccaagattgcagctggatattgctctggattgaaaatcacattgcaaaaaaatgcagtcatcagttgtgcagcaatatgcagtcaaaaatagcattcatttacagcaatctgcccaaatattccagctatatcaatgcattgattcagcaatatgcagcaatctacccaaattgtccactcactccaggatacacatggaaaatatccagcaaatatgcagccacaaatattcccatttgcaatactcctgcttacagtagttcattgcaatactccagcttacagagattcaagcaatggcgttttgggtttagatccatgattttgctagggttaggccctaaccctagcagcgacgggcggcggtgacggtgtctacggcggcggcggcggcggcagcgtcaaccgcggcggcgacgacgtcaaccgcggcagcgacgacgtctacggcggcgacgacgtctacggcggcgtctacagcgtggtgcatgtggtttcacggcatgattttgtgacggacaaacccaaaacgccatggatctaaacccaaaaaaccaaggaactaaaacaaaaaaaatcaccaatcaaatcaagctagctcgggggaacagaaaatcacttccaaaaattaaaccctaactacaataaccgagaaatagcaggaggaatcgattccaaggatgctcgaggagatcaggagacgaaccacgttgcgttggagaaaaatcgtcggagaatcacaggagaaatcgaaatcgccaggagaggaagaagagggtactgttcaaaattgcaacggcatccgcttccgcttctggtaagggcgataaaaaaaagccaaaaacggttccgtgctgtggatgggctctcgtgggccaagcccaataggaaagaggctgagaaaagccagaaaaggcaagtggtggcggcaagtggcggaaagggaaatcgatcgctgctcctgtcgcccaacgattgatcgcgcattaggagtttcgttccatttaggtataaagtacactgacttccctagcatttctggtaattcacgacgctatgttacaatgcttgattactaccgctaccgactccattaccggttgaataaactaaatccctatacttgatgtggtcatctaaatgatgcaatatgtgttgactcatactcaactgtagaagggtctagactaaaatacattgctgacaaccaacatgaactccgctcagaatctgtacaagggataagtgatgccattgatcatggtcttgcatctggggattctgtaggaaagaagtatgtactgcccaccagttttactggtggcagacgttatatggtacagaattaccaagatgcaatggccatatgccgtgtatttggagcacctgacctatttgtgacttttacttgcaattctaagtggcaagaaatatacgatgcattgttgtttgaaccaggccaggtaccaagcgaccgttctgatatgattgttagagttttcaacatgaaagtagacgagtttatctcggacattaaggaaggaaagacatttggcccagtccttgctggtaggctttttgtttttgctctatttagtttgttctgtgcttccttggttggttctgatattttgtgcttatcatatagtgctctacacagtagaatttcagaagcgtgggccccctcatatacattgccttatttggcttgctgcatccactattgacttcagtgctcctattgttgatgggttcatttctgctgaaatccctgacattttcactgatccattggggtatgctttggttgatgagttcatgatgcatggcccttgtggcaaccagaacaaatcatgcccatgcatgaaaaaaggggagtgttctaagcacttccctaagtcttttcaggacgagacaataatggacgagtttggttttactatttacaaacgtagagataacgaccgatatgttcttaaaaatggagtgaagatcgataatcaatgggttgtgccttacaacatggaacttcttaaaaaataccaagcacatataaatgtcgaatggtgcaataaatctaacatgattaagtacctctttaagtatgtcacaaaaggaaccgacagatctaaagcgtactatgaggttaatagtaagttaccgagtcagttatctgaaaataatagtgcaccacaaaatgacacatcaaagaaaacaccaaacagtaacagcacaccacggaatgagatacaagagtacattgatgcaaggttcctttctacttgtgagtccctttggcatgcttttgagtttgatatccactatagggtgccttcggttgagcgcctaactgtgcatcttccataccagaactttgttcgatacaaaaaaggtgctgacctgaattcgctgcttacaagtcctgcagcccaaaaaatgatgctgacagaatggtttgaggccaataaaaaacatagtgctgcaagaacactgacatactgcgatttcccaaaggaatggacatgggataacagctcatgtagctggcatcctagaacaccatgcgaaaagataggtaggatgtactatgtgagcccagcgagcggagaattgtactacctatgaatgctattgatgatagtgaaaggtgcgatgtcatatgctgatgttagaacatacgacggtgttgtttatacaacgttcagagaggcgtgcgaagcaagagggttactcgagagtgataatgagtggtacttgctatttgacaaggctataatatctgcatcatctagccaattaagacagttatttgttactattgtgatgttctgctctgttggaaatgtgagatccctgtttgaaaaatattggttgtactttaccgacgatatacaacgacgtcttagaatagctctgttgaacccttcttatttggtcccccatgaaaggctgatgtcactgttaatgaaagaagtgcagactgctttttccaacagtggtggtaccatagacgactacgatttaccgcgcccagcgatttattcagatgatgtggtaggtaatagaatgattgaggaagagttagctcttgacagcgccacactagataccatcgctagatcaataattccataattaaacgtcgatcagaaaactatttttaagacgattatgaaatgttagcgattccaaacctggattcttttttgtatatggccacggtgtacaagcaagacatttctatggaacgcgttgattacaaaaatacgatctgaaaagaaaattgtccttgctgttgcttcctcaggtgttgcttcactgcttctgcctcgaggacgcactgctccttcaagatttaaaataccaattgagattgatgaaaccagtatctgcgctattaaaagaggtactatgcttgctgagctgattcaaaaaacatcacttattatatgggatgaggctccaatgactcataggaaacatcacttattagatcgaactttgcgtgatttactatccgagcaaaaaccttctaatggcaggctgccatttggcggtaaggtagttgtgcttggaggtgattttcgacacatactagaagtgataagaaagggctcgcgtgcttccatagtcgatgcatccataactaactcccccctctggcggcatgttactcttttaagactgaaaattaatatgagacttcttcaaaatgggcttaatgaacgcacccgacgagaccttgaagaatttggtaattggatcctagatctcggtgatggcatgctacctacaaccaaaaaaaacgatgaatctgaaccaacatggatagatattcctaatgatttactaataaagacacccggcgacaaagtaaaggcaattatagatgaggtctttccagatttcccctccagctacacagatcattcctatctagcatgtcgtgctattgtttgcccaaataactcaacagtcgatgaaataaatgattgtgttgttaagatgatacctaccgaagctaaagaatatcttagctgtgatacaatttcaaaagcatgtgaccatatgcctgactttgatatactctacccaactgagttcttagattctattaatgttaacaatttcccatcacatcgtcttactcttaaaaagggtgtcacagttatgttgttgcgaaatttaaatcaatctatgggtctttataatggcacaagactattggttgtttctctaggccatcgacttatagagtgtgtaatattgactggttctaacattggtgagaaggctttcatatctcgaatcgcgcttacaactacaagttctaagtggccttttacacttcaaaggagacagttccctgtgcgcatatgctatgcaatgacgattaacaagagccaggggcagactctttcacgggttggggtttatctaaaaaaacctgtctttacacatggccaactataagtcgctgcttctaggtcaacctcaagagtaggccttagaatccttatagaggatgaggatgaggtctgtggttcaaaaaccaggaatgtggtttaccaagaagtattggacgtagtgagatcgatggtatattttagatagtttagctccatcgacatccctatgaaattgacgctatatccaaatacactttaatatattgtgctttctatactgcaggatgttggcacctagctaccagctatatcgccttttttgcagctgttgtatacctattttttttcacttttaggtgtgccttgtttgtattgtgtatgtaatgttgcctatcttacatccctcttatctatgcctttactatttgccgtacctatgatatcctaggaatttccgttatgaactatccgtttcaaactttctgtacaaatggaggctacgctaattaataggcttgaacctagtcttgggaacccaacaattcgtgttcgtgtgtcaaggttctgggcttttcgtgaccaaaatgatgaaagtaatttgcaccatcttgggctggttctgcttgatcgcacggttagttctttggaatctttgcttacagttcatacacatattttccctttgtactactgtgtaaacagggagccagtattgcagcccagattttcccaccattagatgagcttttccagcctcagatcactgaagggaaggtgtatgatctgacattctatcgtgtaaggcagtgcaccagccagtataggccagtgagcaatatgcagtcaatttctttcacaaagtggtccacactggaagaatgcaatgatgtgctagaagatttccctaagtatgtttactctttaacgccatatgattagctaaggagccgggtgaacaggaaagactttttcacaggtattatagttgcagttaagttcttataaattactactgttctcattgcattcctaagagactattccttcctattgtcatcatagcagatgctattggaatcattactgagataacgtcagtagctcctatccagacatgcatcagagacggtgaaagcctcaagaggagcatctacatccgtgatgccgagttagtcctccatctcagtttttcatatctgccaaaagatatttactctgcttccctaacaactttgttgccactgttccagtaacgccagctaaccgctgcctaatattctccttcctttcaatatgtgctttttgtatattgttctgttttactaataacataacaaacacttaccatccatatactttttctgccattatactataccttttaatagtaatgtgacaataaatgttgcgctgtggggagaccgagctacaagcttccctgcaaatgacattcttgaggctggccaaaagagtcacaagtagtaatctttgttgggacacttgtcaggggatttggcagtaagtacattagaaacgtttgctatcgttattagtagctttccacaaattctctgagattcttataatatgtgtacagggaatgtttctttatctggtaactctgcttgcaagtggtacataaaccttgacaaaccagaggtggctgccttaaaaaacaggttccttatttgtcctttctttgccatttatatcttgttagtttctattcctaccaccagtttaaactcacacttattggttctgtgcagcatcaaaggaaattatgaaccgataaaatatatcgacctcccagcctcatctgatgctccaaacaatgcagaacaaaagaaaattattgagatcaaggacctgcacccttttaagttcaaggtaaatctttactaatatcagtactcattattgtgtttgccattttgcaaaatagtgtgctaatcaccaccctacttctggcaaacagaaacatcagttcttggtcactgttgtcattagaaaaatcaatatggatagttcctggtggtacactgcttgtgacatatgcaacaagacagcaaagcgatttggtagtggatacagatgtggagatccaacatgcccaccagttatttcagcttcgcctgggtcagttaccacgggcttcaatatgtaacatattgaatatatattagtgtgctatatctatactgattatgcttttcgcaggttcaagctgagtgtgttagcaggcgacgacacagctgatacttcgttcattatctttggtcgtttggcacagcggctcattggtcgttcagtggagacgctgttgcagcagaatccagctaccactgatttcataccaaaggagatcactgatctacttgagaaagaattttcttcgaatgttagtatcatagagaacactgcctttactggcaatgttgcgttccaggtgaacaggatccttggaggtgcttcttcccacggccttcccttgcttcagtcgccatctgcatctcaagcatcttctctcccagcttccatggctctatcaccaactccatcagttggccttagtgatgcacagactggaccaaccagcccatcaactgctgtatcgaaaaagaaggagttggacatagaatgtgtttcaaagacccatgcagatgttcaggatgaagaggacgtagaggatgaggttattttgcttctcagttttcttttaatcaaacatctttcaaaactgagtactgaacttctttttctatggactagggcgctgatcatgccagcctgccacagaaatctcctccatctggcactaaacaaagcgcttccaaaagctaaaaaaaaggtaagctctattttgctccttctaaatattgctagatagaaaattctgcatcaggctaataacaaatcacaaataacaggactagaccatctcctggcataggcgctgctaagaagttgttcaaagacgatggtgacgatggcgctggtggcaggtatagcaagctccaaaatattttttgggccctatggtcaaacgcttcagatttacagtccacatctttgtcctaaatttgcgctttctttctgtccttccagtgccatcaactaggcctaatatgttatgcaagagacctcttacttttgggttccacaattgcagcctcaatcagcttcatcgaaggagaacaatatatcccgttctgtcgtgcttctgcaaactgtgctgctattaaattgcccgactgtctgtagcagcaattcttttgcgaaaaaactttgtatgaattgctctttatgcatgtaaccaggattctatattatcatgcctccaccgtgataatactgaatgctggtagctatctaaaactacttcgtctgactgagcattaccaggtttattcaagcatccagtttagttcacattcatcgacccaggatatctgtgcgcttactgaccactatcggcctgctttcaggaaataaaagttaatcaccatccagatactaaacctgaatatatgtttcttccatacaaaacatctatagaccataccacaccgctgtatagtacaaagaaccaaaacacacacacacacacatacagacatacatatatatatatatatatatatatggtattgaatgctagggaaattcacccatcaaccaactccatactgaaacaacagcctacgcattctttacacactccatccacaccatcgcttgcccgtacatgctgcctttgaagagacatgacatatttgcagcgagatgccatacagcacatcctattatttctatctctaccacacttatcttctcctcttcgccgctacttgcacctccccaccacatatctgctgctcttcgccttcccgtcagcaagaacagctttcacaagctcttcagcctccctccccaggtaacaactgcagcttattatcttcagtaatctccatatgttcattcctatccctcctctccctatacagaagtgggtcagatccaaacatctgtaatagaacaatataggaaagtattagagcaaacaaactaaacatttttttgatctctgcaatgggcacgcgttaaccaacaggtcttctatttctttcctagaacactatggaggcccatcaagataaccaccctagccagagacaaccacgaccattgtcctatggcagtagccgtccactgttagcgacaaaattttcaagccgcggagaaatttcacagctatttgccgatgtcatttaccaggacgctgtggttgtcaccgttcttggagctggcaatccaaacacaacgaaaatatcagctatgataggcttcgtgtgtgactgccagattgatgattttgccttactgccgttcaggcacaaaatgtacattgtgctattcatggactcagacaagcaatatgagagatctcaaaaggcgtttgcccagaaatcctacacattccaaacaactcagctgcattttgagcctttcaagatgaacctttcaagatgaaccttcatagtgtcccaaacccactgcgccaaagagtcatacttgcactcgaaggaataccaccagaattatggaacaagcaggccatgaaagaattactagacggtagttgtatggttgaagagctttatgaagagcatcatatacaaaacctgtcgattttcagattgtctgcatggacaactgaccgcaatctcatccccaaactaatggattggaatattgaggaggttcaaggagaggaacaatcatctgaccaaggctggaaacgcaatgcagatttatttgtcatattaattcacattgaaaagctttttgactacactgatgaagacagcgacaatgagatcgatggagaagttttaaagcaatatgagaaagacaaccgtcgactgccagttataaagacattccagtgggtatctcggcaaacagacacagatagcggacctgttgaaggcgggtcgccggcaaggccaccacggcgtcttcctcttgaatttcgtaggcgccacccatatcatccagctccatagcagaatagttccttctatatatgttctcaccaaccacatagccaaaccacttatgctatagatctcctatgtgatctttttttggctactccattagagtcatacgtaattctcctggttcgaatatacaattccatcgcatgcactatgtaacatatcattttacgtctgttctcgcgacactctattttgctttcaactgatcttcaatgtttgcttacactcttccaaacttaacattactcttcactgccattacggcgcggcaaggcacgccaaacgtcctagtataatgcataagcagtggcgaatctaggataaaagttgagagggtgctccatgtaagccagtttaagctaagttaaatactatcttgtcccaacttttactctctcgttccgcgcacaaccgtgcatgttccccaaattgtaaatgatgcgtttttttaaaaaaaatctatagaaaatttgctttaaaaaatcatattaattcattttttaagggttttaacctaatacctaattaatcatgtgctaatgggttgctatattttacgtgcgtgaaggattagttactaaccggtaccatccaacattgccttaaaaggcctagcaacatgaaaatatgtgtatgccggtcatttgctaaacaaatttatttttttaggcaacctaatttaaattaatatataaatagaatgaaagcaaatatgtgctgccctaaccaaattacaaattcaaactaaattttccatctctatgaacatgtcaagaccatcaaactgacaaaataccaaattaccaatcatttcataagcattaggaacattttagaaagaaaaaataattaaataaattggtgtgtttgtgttgactaaatggcacatcatcatgtaaccaactgacatgccctgttaatctgtatgctctcatcgattgggcaccttgttaacaaccaaatttggtaacatctatgtcaggaaagaggacttgatcaaagcggagttggaggcggagatcgagttcggaagcagagcagggatcggctggaatccagatcggctacggttaggatcggttgggtctgagtcgggctaaataagccgatatagccgattccgacaatacaacttgtatgcgacatcgggttcaagttagtgtatttcaagatgattgccacgcacggatagagtcctgggaaggcaattgtatctattaattaggatatgttatgtaaattccttatagataaatgtgggcaaaagtctgccgcaaagacttatagtatcttagagtttgttagagataatggtcgtgtccagtatgggcatatcttgtaattctcgggtataaatagaccccgagccttatgtaatttttgaacacacacattcaatacaatcttggcgcatcaccaccctttttgctttagttttgtttcgacgagttcttgctttcgggttgagctgcatcgatttcgatcttcaacaagaggtaaaattcgttatgacgaattgcgttcttaggattagtgcttccatctttatgacactctaatcttgtttatataattcgtcgagttatcatatatcttacataatctctagcaatatcgccatctaatctactatcggccaatatctgtatgcagaaggcagccgattaggttagatcttgatgttggtctagattatataagatatctaccattctatgaaacttctagcggcttgattgtctagatatcactcttcttttcatacttaatactgcatcagttgagtttgatctattaagtcgtgcttagaatatcgatctctagcctgccttctagttgccgattagaatagcatcggagtttcagccgatcgtatctgatttaactatatttgttctatatgctatactgatatgttaaatctgccctttatatcaagatattgccgtatctaaacatgttaggcctttgtttgatatattattcttgctttaatatcctgatatggagtagtatcggagtattagccgatacatgcgagatctatctgatcggctatgctataaacatatatagtcctgttattgatatatgtttcgatctaagtgatttatactatctcggcatgatgaccgatctatcccaatcactttatttaagtatatatcgatatgaggagtatatatcgtttatatctacagccgatcgagtagatttagttcttctttacttattcgtgactgccgatcgatacacagatgacatcggcccatagataaatgatatgtcatcggcatctagccgatcggctatcatttatagatttaactacggtttctttgtttctatttcttgttgattataggatcaaatcaactggcatgctaatacatccgaaggcgagctttggacctgcactggagttaagcagatctcccaggccatgtgttttctgtcaacacgcttttggcacgccctgtgggacctgattagaagtcagacgtcagttcttcctcatggcttagaaacaaccaccaccaccatcaagcccaggttccgttaaaggcaaggcgtcgaagccgggattaactgacatcattgatgacaacgtcatgccaatcgatccagagaaattcacgcctgagcagaagcaggagtttgaagcgacgctgcagcaagcacgagatcagttcctgaactcgttcatgcaaacccgcaaggggacacttgttcagaagtataaaataaaattggttgctgataatcttgggaccggttcttctaaatatggagaggtgaaaaaagctccagaaggctcggctcagccgagcaacaaaggtgctactgatggttctctaggaaatcaaggcgacaaccctcaaggggtccatggagtacaaggtgatagagtgcatggagctcaaggtggtggtgctcaagggccgcaaggaggaaatcttaatcagagtaacgagctagcacaagattttttcaataacttccaagatcgggttgattacgctgtgcatcatgctctgatcaatcagtccggggtattagtcaatacattgtcaaacatgatgaagacaatagccgatggttcgatagtcgagcatcaggctacaggcccagtttacttgcaaggaggtgtcttcccgaattatcgatctttgatcaccgatgttcagccatctgttcaagcggttcgctccgttgcacccacaattcagccgacggcgccagcatcaactcccctgcctggtacatcagctatggcgccaggccagccaatgaaccttcggttgttaatgagggagcatccatagcctattgggcagattgcgaatcagccgacccaagatcaagttgctgccatgtttttgccacctccacctattgttgatccagtgcagcagcagccgattcagcagacaccaccaatccagccagttgtacagccaatccaacaacaggtcgtacaaccagctcagcaaacaccaccaaggcagcagcctctgcaaccaattcagcaaacgccaccaaggcagcagcttcagccgatccaacagactctggtgagacagcagatcattcagccaattcagcacccggggtcggcaaatgcatcggccgggtttgcaccacctggtgggcaacttgcgcagcaatttgtaaaccaagtcgtcctagaacatttggttcaccatgcacagccggacggcatagtgatgcctcagatggttcctgagcacttggtgcgcaacatccagccgaatctccataattatcaagggggtaacttgaactatcaatatcagcctccttccccacaagcccaatatcagccagggggattggctcagcccagttcgcatctcagtttggtcaattcgagcccatgcagcaacagccgcaacgagcagctcagcaacgaccatgggccgatgtgattgctgatgtaatgaggaacaatttggactcaaaccaaaagaaactggaagtttgtatcggcaaccttaccctgagtggtttgaaagagttcctcttcccaatcagtttaaggttccaaatttctccaaatttttagggcaagagggcgtgtcaacttatgagcacatcagccgattccttgctcagtgtggtgaagcatcggctatagacactctgaaagttaggttgtttcggttatctctatctggatcagcttttacttggttttcctctttcccatatgggtcaatcaacagctgggccgatttggaaaagcaattccacagctacttctacagtggggttcatgagatgaagttgtctgacttgacagcgattaagcagtggcatgatgaacccgtgcacaagtatattcagaggttcagagagatgaggaacaagtgctttagcttgagtttgaccgatgctcagttagccgatttggccttccagggtatgattcctcaatcagggagaaattctcgtccgaagacttcgatagcttatcgcatctgatacagtaggtgaccttgcatgagcataggtcggcggaagtcaggaaaagctctaagaaggttaatcacgtttgtccatatatatatgggtcggatgacgaagaagatgattctgagatagttgcagctgaataggtgaggagcaaaaaggtcataccatgccaatgggtaaaaagtcctggaaaagaggaaaagtatgactttgatatcatgaaagctgacaagatttttgatttgctactccgagaaaagcagattcagtttcctgctggtcatatgatcctatctgctgaggaattaggcaagaagagatattgcaaatggcataattctgggtctcattctactaatgattgtaaggtttttagacagcaaatacaggttgccattgaagggggaaagattaggtttgatgattccaagaagccgatgaaggtcgatgggaatccttttcctgttaatatggtgcatacagttggtcaagcagccgatagggcccgtgcaaagggttttcaagtaaattcggctaagattatcaacaagtatcaaaggaagtatgataagcaggaggagaggcattatgaagaatacgacgatggttttgatcctcattgggattgcgagttcttcagattctgctggaatgaagggatgaggttgccatctatcgaaaactgccttggatgcagtgatatcatcgagagctcaaaccgatcacgtaatagggataatcggctgagacaggcaagactccctgttcgtcaaagattgggtccgatgaatcaagatcgtggccaagaggatgaggtgatcaggaagaatcaatggtgtccttctggtattttcacggagaatcagaaaaggagggtccagagattgaggagcagggagcgttttcaggaggttgaagaggaaatcaaccatcgactgaggaaaccaaaaccaagacaggagtggcatgtcaagaatcaggttcctgtagccgatgatgctgcagccgatgaggtgaagaggttggcaaaagggaagagtgttatagcggcaccaattaacatggtctttacattgccagctgaattcgggatcgatcaggccgatgtcgatgaattggaagaggaatcggctaagttggtcctgtcaccagaacatgcagtattcgagaaacccgaggggacagagaatcggcatcttaagccattgtatataaatggctacgtcaatgggaagccgatgtctaagatgatggtcgatggtggggccgcggtgaatttgatgccttatgccacattcagaaagctgggtaggaatgccgaggatctcatcaaaacaaatatggtgctcaaagactttggtggtaatccatcagagaccaagagtgttctaaatgtggagctgacagtcagcagcaagactattcctaccacgttttttgtcatcgatgggaagggttcgtacagcttgttgcttggaagggattggattcacgccaactgttgcatcccttcgactatgcatcaatgcttgattcaatggcaaggcgacaagatagagattgtgccagccgacaggtcagttaatgttgctagtgccgatttagccctttgggagatggatggccttgattgtttatctggaaaagtctgggatggagatgttctaaaagtgtccgattctgatatacagccaatcgaagatggagaacccaagctattactttgagagcgtcgtggagggttcgaatgtctatgctaaggatacagtagatgatctcgatgacaagcaaggtcagggttttatgtcggccgatgatttggaagaaatagacataggtccaggcgatcggccaaggccgacatttattagcaaaaatttgtctccagagtttagaaccaagctgatagagctcttaaaagagtttagagattgcttcgcttgggaatactatgagatgcccgaactcagccgatcgattgttgaacatcggctacctatcaagccaggggttagaccacgccagcaacctccgaggagatgtaaagccgatatgctcgagcctgttaaagccgagattaaacgattgtatgatgctggtttcattcgtccctgccgatatgccgaatgggtctctagcatagttccagttattaaaaagaatggcaaggtcagggtatgcattgattttcgagatctaaataaagctacaccaaaggacgaatatccaatgccagtagccgatcagctggttgatgtcgcatcagggaacaaaattttgagttttatggatgggaacgcaggatataatcagatctttatggctgaggaagatatccataagacagcttttagatgtcccggtgcaatcggcttgtttgaatgggtcgtcatgactttcggcttgaagagtgctggagcaacatatcaaagggccatgaattatatatatcatgatttaatcagctggttggttgaagtctatattgacgatgtggttgttaaatctaaagaagtagaggaccacatagccgatttaaggaaggtttttgagagaaccagaaaatatggcttgaagatgaatccgacaaaatgtgcttttggtgtgtcggctggccagtttttgggatttattgttcatgaaagtgggatcgaggtgacccaaaggagcgttaatgcgatcaagaaaattcagccctcggaaaataagacggaactataggagatgatcgacaagataaattttgtgagaaggtttatttctaatttgtccggaaggttggaaccttttacaaccttattgagattaaaagccgatcagcaattcacttggggggcagagcagcaaaaggctttggataatatcaaggagtatctcagctctcttcctgtattgattcctccacagaaaggaataccgtttaggttatatttatcggctggtgagaagtcaatcggctcagttttgattcaagaattggaagggaaggtgcgagttgtgttttatctcactcgacggctcttggatgctgagactccatattctcctgtggagaagttatgcttgtgtctgtatttttcgtgtacgaggttaaggcattatctattatctaacgagtgcaccgttatatgcaaagccgatgtagtcaggtacatgctgtcggctccaatattaaagggacgagttggaaagtggatattttccttgactgagtttgatcttcggtatgaatcgccaaaagcgattaagggacaagctatagccgattttattgtagaacatcgtgatgattcaatcggctcggttgagatagtaccatggactttattctttgatggatcggtatgcactcatggttgtggcatcggcttagttataatttcccctaggggggcatgtttcgagtttgcttatactattaaaccatatgcgaccaataatcaggctgagtatgaagcagtgctcaaggggttgcaattactcaaggaagttgtagccgataccattgaaatcatgggggattccttgctagtaatcagccaattggcaggggaatatgaatgcaagaacgatacattgatggtttataatgagaagtgcctggaactaatgaaagggtttcgactggttactttgaagcatgtatctcgagaacaatatcttgaagctaatgatttggcccaaggggcatcggggtataagccgatgatcaaagatgttaaagttgaaattgcagcagtgtcagccgatgattggaggtatgatgtgcatcagtatttaagtaatccatctcaatcggcttctaggaaattaagatataaggcattaaagtatacactattgaatgatgagctttattatcggacgattgatggggtattacttaagtgcttgagtgccgatcaggctaaggttgcaatcggcgaagttcacgaagggatctatggtactcatcaatcggctcacaagatgaagtggttgcttcggcgtgcagggtacttttggccgacaatgctagaggattgtttcagatattgcaagggatgtcaagattgtcagaagttcggagcaattcagcgagcaccggcgtcagctatgaaccatattattaaaccgtggccgttcagaggttggggaattgatatgatcggaatgataaacccaacatcgagtaaagggcataaatttatattggtggcaactgattatttcaccaagtgggtagaggcgattcctttgaagaaagttgattctggggatgctattcaatttgttcagaaacacataatctaccgatttggtcttcctcaaactattactacagatcaaggttcaatcttcgtgtccgatgagtttgttcagtttgctgatagagtgggtatcaagttgttgaattcttcaccttattatgcacaagctaatgggcaagccgaggcgtctaataagagttttattaagttgatcgagcggaaaatttctgattatcctcggcaatggcatactcgattggccgaagcattatggtcttataggatggcttatcatggatagattcaagttcccccttacaaacttgtttatggtcatgaggctgttttgccatgggaagttagaatcggctctcgacaaacggagttgcaaaacgatttaacagccaatgagtattacaatcttatggctgacgaaagggaggatttggttcagtcacgattgcgagcccttgcgaaggttactagggataaggaacgtgttgctcggcattataataagaaagtggtacctaaagatttttcggaaggagaacttgtatggaagctgattttgccgattggtactcgtgatagtaaattcggcaagtggtcgccgaattgggaaggaccgttccaaattcataaggttgtgtctaagggagcatatatgttgcaaggacatgacggtgaagtttatgagcgagcgctcaatggcaaatatttgaagaaatattacccaagtgtttgggttaacgcatgatcggctactattgccgatgcatgacagccgatgtgtttacatcaccttaagatggccgatactgttgtatcgtccttagttgtttttcatggtgtaatcggttgtggtttgccgatgtacaatggccgacattgttatgtcgcccttagttgtttttcatggtgtaatcggttgtggtttgccgatgtacaatggccaatattgttatatcgcccttagttgtttttcatggtgtaatcggttgtggtttgccgatgtacaatggccgatattgttatgtcgcccttagttgtttttcatggtgtaatcggttgtggtttgccgatatacaatggccaatattgttatatcgcccttagttgtttttcatggtgtaatcggttgtgatttgccgatgtacaatggccgatattgttatgtcgcccttagttgtttttcatggtgtaatcggttgtggtttgccgatgtacaatggccaatattgttatatcgcccttagttgtttttcatggtgtaatcggttgtggtttgccgatgtacaatggccgatattgttatgtcgcccttagttgtttttcatggtgtaatcggttgtggtttgccgatatacaatggccaatattgttatatcgcccttagttgtttttcatggtgtaatcggttgtgatttgccgatgtacaatggccgatattgttatgtcgcccttagttgtttttcatggtgtaatcggttgtggtttgccgatgtacaatggccaatattgttatatcgcccttagttgtttttcatggtgtaatcggttgtggtttgccgatgtacaatggccgatattgttatatcgcccttagttgttttataattttatcaatactcttcacattgtaaaactagggggggcatatatatatcaaaatgcggtaaatacagtgcaaaattttttagcaaatttcaattctaagtcctattacacaaagattattgagataagtatcgctggatagccgatatagccttttgcctaatctactctacttcttctatggcttgggcatcttgagcatcggttccagggataacttttagggacttagtcagctcaacaacatgcttgatagccgatttgagtcttactttctgttcttcaatgaatttggggagatcggctagtttcttgtgttccatatctagctcagcgttacattcttcaagttgtgctaagagttcaatcttgcgagcctcaagccgatcaatgttagacttgattgggccttcagataattgatcaagcttggacttctcttcatgtacaagttgtcggctagcttggatagtggcctcaatgtccttacgttctcgccgttcggctagtcttaacttggctttctccagtttgaattggtgttgctcaaggtaaacggctggagtaaggatatcggctaactcatctgggattaaagcctgaatctcgtgtagccgagccctaattgagccacaatcaaccaccaagctgtctagcgatgatgcttctagccgatctaaaatgcttcctagagttttcttcacatcatcagataaaggagccaaggctttgcttgtggtatcttcttctccttcatcaagatagtctctgatgtcaaaagagaaaagatcagctaacacctgcagtgacaatttagaagcagattagaggttaaacgattatagccgatttgaatgcttgttatgataaaagaaacttactgggatagcaggagcagctggttgttcttcttcctcgacgtgatgacttcccgccgctgaaggggtctgatcacttgatgattgttgaacaggaggaggaggaggaggtgaaggcagaaaggaaacaagtgccagatagaatcggctaaaaaattaactaatgaaaagttaaaactatcttactagtggacctggtttagatgttgttgcagccgatttcttcttcaccgcagtcttctttttctgcaattataagacttgggaatgatcggctataagacaaaataataacgaaagggattaacaagaaacacttacccttgagaagtgaaccggagcagaaggagtcggagaggtttgcttaggcgaagccgatggtgttctttcagtatcacttacctcggctgcggcctgatcaacctcatcttcaattacctcttcatccaaagcttgtttgacggatggatctagggtaggcagatcattagctggcttggttttctttgtcttcttcttcttcttaattagggctacgatgcttacagccgacgatctggttttcctctttttgccggcatcggctggttctttgacgagcccttgaagaagagctgatgtcctgggggcgtcatagccaataactggaggagatagcctacctccgttaggaattaaacctggggcatatcggatgtctttgccactgttgctttgatgaggaggggaagactctgttgtctgcaaatcaaaaggacgattagttgagattaattggctgaacagttatttaactagagttgagcaaagttgaagacttacttgagggacaacatctggaaagaggtatgtcatatacattgaagctggttgatggaataaatgcagtttccatttaccccaccacctgtcaaagcttttgcttctgaatgttgccagttctatgttgtcaatactgcccagagggggtccttgaaggctaagtagccaatcgatcattagggttgatgaaatccctcctcggcattggatcttgtcagcaaagaataagccgattgggagttggcccattccgagttgtctagctgagctcattggatgatagaattcataggaagcttggatgtttcttccttgatgaatgccaacaggaaggatgcatggactgattgcagccgagaagatttccctggatgattggtatacttcatggttgatgtcttcgaatctgaaatccactgggtgctcaagttgtgcagagtcttcataaaggaaccagattctagcatctttttgaaagccttcatagaagctacaaaaccaatccttgagcagttcagccgatagttttgccccggcatcagttggtgtagaagcgtattctccgtatgatgtgcatctccgatgagtacgctcttctccatcatcccctacaatcggctctagtcttgggaactcggcttctagtacggatggccgattgacaaccttcatgactatcaggtttaaccaggtttgtagcagccaccagggtccacctgctccaactactgagccaactgctatcttagccgatgcattgctcaacatatggtatagatagccgaggagaattttgcccaaggggaattgtctctttgtttctagagcttcagccagaaattgccagttggttgtggggccgcaacttgatccacagaaaagaaatttttctagccacattaatagaaaggccacatgttctcgaggagtgaccgaaccctggcccatgtatgctgccacatagcctgaccaacctcctacgcttttggttttgaagtcatattggttctttgtgttcaaactcatagggttggctgatgaggtgacatccagacctgtgatcatactgatatctatgagggttggagtcataggcccttgattgaacaggaaggcattagtagtgtttgaccagaagtaagaagcagctgccattaggggttcatccttggctgagtttgctatagtaaggtcaagtgcttggccgattccaatttcatcccagtgaaccctcttgctggctaacacacgtttgaaccatgtggtccagctcttttctggtagaactttctctagagatggccaagatttgaaagtattcttccagtgacctagatctgggttggttagtctaaaggggattctattggtttcaccaacaatgaactcggtggggtcaggattgccgattgggccaagaaagtagtaattttcatgcgtcagactgggaattgcgacttggtgagaaagatgctacaaatttgaagcaaccaaaagaggaaaagcaatatgagataagagaagatcgatctgctgctaaagaaggggatttagccaatgagaacttacctcagcgtactcggctgttggtgcaccagatgggctggcggaggacgacatggccgcgggcggagatctcgtcgaagaggaggtcgcctaggaatcacctttgcaccggaggaatcgccggagaagagagagaaaaggtttcgcttgagcggtgaaaacggaagtcacggtgtgagatttctcgggggtaacggttagtatttaaagcgctggaataacggtcaaaagcggcggagtgcaaaactcgctcggagtcggcatacggcaaatccggaacattatcgaatatcccggacttggggggcatgtgttaacaaccaaatttggtaacatctgtgtcgggaaagaggacttgatcaaagcgaagttggaggcggagatcgagttcggaagcagagcaggaatcggctggaatccagatcggctacggttaggatcggctgggtctgagtcgggctaaataagccgatatagccgattccgacaatacaacttgtatgcgacatcgggttcaagttagtgtatttcaagatgattgccacgcacggatagagtcctgggaaggcaattgtatctattaattaggatatcttatgtaaattccttatagataaatgtgggcaaaagtctgccgcaaagacttatagtatcttagagtttgttagagataatggtcgtgtccggtatgggcatatcttgtaattctcgggtataaatagaccccgagctttatgtaatttttgaacacacacgttcaatacaatcttggcacatcgccaccctttttgctttagttttgttttgacgagttcatgttttcgggttgagctgcatcgatttcgatcttcaacaagaggtaaaattcgttatgacgaattgcgttcttaggattagtgtttccatctttatgacactctaatcttgtttatataattcgtcgagttatcatatatcttacataatctctagcaacatcgtcatctaatctactatcggccaatatctgaatgcagaaggcagccgattaggttagatcttgatgttggtctagattatataagatatctaccattctatgaaacttctagcagcttgattgtctagatatcactcttcttttcatacttaatactatatcagttgagtttgatctattaagtcgtgcttagaatatcgatatctagcctgccttctagttgccgattagaatagcatcggagtttcagccgatcgtatctgatttaactatatttgttctatatgctatactgatatgttaaatctgccctttatatcaagatattgccgtatctaaacatgttaggcctttgtttgatatattattcttgctttaatatcctgatatggagtagtatcagagtattagccgatacatgctagatctatctgatcggctatgctataaacatatatagtcctgttattgatatatgtttcgatctaagtgatttatactgtctcggcatgataaccgatctatcccaatcacttgatttaagtatatatcgatatgaggagtatatatcatttatatctacagccggtcgagtagatttagttcttctttacttattcatgactgccgatcgatacacagatgacatcggcccaaagataagtgatatgtcatcggcatctagccgatcggctatcatttatagatttaaccacggtttctttgcttctatttcttgttgattacaggatcaaatcaactggcacgctaatacatccgaaggcgagctttcgacctgcactggagttaagcagatctcccaggccatgtgttttctgtcaacacacctattacgcaggattgtcacaacccaaccaacagataatagtcttcctcctctggttgctactgctactacacaccctttcctctactacctctgaggagctaggggcacctggggttcatcgaggggagctggggctgaagccccaacgatgaattcacccttgcatgtcctttgagttctggatctagatctagcagatcaagaacaagacgctcataatccccttctaattaccttattcaatatcccctctaggttaagtcaaccattagatttagtcataattattatgtcaaccattagatttagtctaaatgtatccttagagcacaagccctattggacattacagcaaacaaccccctcccccactccaaaagtataaagcccagttcactcggtgctcccaacttctattcttccccattgagacccatgtgatacccatgccatatactgacatagacttcagctatgttagttgtgccgcatactgcgccccttttcccacgaaaatccttgaccccaatgcctcaactagttttgccgcaccttcaaagtgagaacccctcccttagtcccacctgcctccaaaattcctccatctctagcttcaggtgcaactattgtgcacaagatccatcaattgtttgtttggggagaagagcttgggtgtaggtaggctaagagctttgcgccgacaacggcagagtcaactttactataagacacatcaatcaaactcgacgaactagattctaaggaatcaaacaagaagataaccaaagtaagaggtcaacttactagaatcttttttgctttgacagaagcaaaggtctagccgcggtcgcccgaggaggctttcttggcagaagaagtctgccaattaataaatcatcaatcgctaagacaaattccataagagaacctagtagtgttgatgttttacttaccacggagacactaaccctcctgagcatccctgctcctttggctctgggaaatttggtccaaagtgtccttttgactcctattgcaccactagagccaacgcctgaggatattgcggtcactgctgcgagggcaatggctgagtggggatgtgcctcaacgtcctcatggagcgaggcagattcctagtggtcgatcaatgcccccaatcacatccgttaagggcgattcttgaaagtattagaatcactactcctacaaaatgagttaagatcaagagaggataagtaatcgggtatttacattgacaatttcctctcgctctgtctacgggaggtcgcacagtggcgctggaatgttatcgactgacgacgttgggttagtcaccacattcttgacatgattcttcaccatgtcactagataaacctgcaccaacattatctagattagttgtcagcgaaagattctactatgagaaatactgctgataacccgtgcaatataccctgatttgatatccgcgtggtgtctccatcccctgtgtactaataattaatagttagagcatgcccaatcctattcccaatctcaaaatttcgtagttttttatttcaaaaaatagatccaacagatctccaatcaacatcccaaaaaattagaaataccttctccgctattctcgttctccacatgtagggaatatcaccgcctaccaatctaccaatcacaagcaattcgcgcacacagctgaaatgtctctgttgtcgcaagctcacccgacgtcgactcgattcacgtcacggctggcccccgagctagtacacgcatgcttgattctcccctccgtcaagccccaagtcacacctagagctctccacaactagtcattcacaaccttgattagtacctccgctgagactcgattcgtgctgccggccaccaggatcctctcgcaccctcctccagccacccttgctggagcctgccaccgatgccaacttgtctcgctgtgcactagttctggccctgcgtgagaggtagaagaacgagaggaggaagagaagaggaaagaaagagggaacaacatgtgggtcctattggtcgggtcattattcaaggagaggaaacatcggtagttttgttggtggtcccacttcttatattatatggtaacatgtttttctaatctgtcggagaagatattttaagaccctaaattctgtttaggaattcctaaattggtgatgctcttactcactccgtatcaaaatataacaaatctaggatttgtgagaatatatcctagtacaataaatctggacagaggactccaaattcgtactatgatatgtctcgtccagtctttgctatacattaggacgaagggagtatgatctatgtccaagcaaaagaatgatcccctaaggccattcccaactcaatgactaggatggtgtctataacattaaataaactgtcacctatgatgaaaaatgatatgacaagtgaataaatgaggaaaaagaagaaaaccatgtcttgcatgagacatggtttctgcacaacatccaagacatcatgtgagataagtagcattaaatttaagtatggaataatagtgtttgcattgaaagagtagtgtctagtactaatttattgatgatgtggagtgtatgaaaattatatctagtgttttgggttgggaatggcctaatcctagctactgatcctagagacccataggcactcgctatttaaacttgcttgtcctaccagtcgtgcaccttaaaccaaaacacacaataataagatctataatcatacaagtgcactcactaggaaatagacggtggaaggagatgaatgatggaagcatatcagagccatgtacccataggtagataagcagagttgagaagagggaaagcaagtactccctccatctcataaaaacaaacctactacgtgatgtgacacatcctagtacatcctagcgctacgaagctggacaaaagctgaattgacacctatccagattcgtattactaggatatgtcatattccgaaatagtagcggatataagatggagtaagagggaaaaattgacgaaatcaagtggcaactatatatccaacaagttgaatttataaggcattctatgaattgaaatgtagtagaccattttttccttttccctttttgaactcatcagcaaaatacttctacaacatattaacaattggcgccagaaaatgccacgcctaacacaaccctcaaccaaaaataccaccccaagacatgagccatctgatggtcaggtggtcacttctaacttgttgcatttaaacttgcaaacatcattacagccacccaagtttctactactacattgtcattctctactcagctaaaatcccgaattataccttccgctagaatagaaaaaaagaagtcagaaaagagacaaattaataaataataataacaaaacatagtaccataaaccaatgctcaacattcagtacagctaggatttttttcaatatgagggcatgatcgacagttacatttcaacccttgaacaaaacaaaatgggaaaaaaaggcggcctgattgaaattccaccttgatgattccaggacacttgtcttgaagaacaatcaaacagcatcttcaagaagcaccttctacagccagagatagataccaggcaggtttcatgagcaacaaaactcaggaagaaacttcccagtaacaaaaacacatccatctgcataatgcatgcaaaacagactgcatccctacagtacataataaaccagacatgtcgcgacgatagtaaactcggtgccttatattaccgctgtttatcgatgctccaaccctctcgatcttgtttcctggattcatatagacttttctttactaggaaattggggaaagagtctccatcttaaagagccattgtatcaagtatactgattacccaaagaagcaaaaacactatgatttaacttatattttccggctttctgaacttgggatagattctgatgtcataggtccattattggacccatgagaactatggttgttaacaggcaccgtgcgctgagaaaaactgagcaactgttttcgctgatactcatttgtgtgaggaaggctggcacgcaacaattcaactggcatttccctgcttataactgctgccacagcaggttgtgtttgcaatgcatgaatcacactatcgaatttactcatgcaatactctgtaagcagcccaaagaaggcatcaaatgatgcttgccatagagctctgttttgcatgctgtaggtagaggccacatgctgatcagtgagaagctctgttgctctgtccagtacagactttatgatgaaagaagccccatcacctgcagcatgtccaaggggtcgcagagggggttgcaacgaagaacacacaatagctgcaaggcaagcacttagtccactcaactccaaccgaacaacacaggttgatacagcagtagcaagttttgtcgttgtctcaacagcactactatcagatggcaaatttccaaatatgaatcttagatgccggaagactgccatgcaagcaattctagcaagctcactgccagaactaacaagttcaaggtaacgagaaagtagcttgcggcccttcggaagagagactattcggagaaacaccagatcatcatttggtgagagaggtccattgttactaggtgtaagtggatcaactagttgcagcgattctgccagctgctcaaggagggcctgtctcctgtttctcagttgcaagccaccatcttgctgctgactaaattgcagcaagcgatcaatatcatctacatcaagcagtaggcaaaggccatcttcaattgtgatcctagcagccagcattggttcttggtcaagtgtttttgaagcagatttttcagtaacgtcatcacttgattcagaggtttgttcaacatcgaggagcggacgaggcctgcggatggaagaaaatggtaaccttccaagagcatcaacctggagatatgcatgtggctcatctttactccgtgcacaggatgatggatctctaatcaaggtcggacagaagtggtgcttgagttgacctcctgctgactttttagctaaacaggcttgatgatagtaatcatcaatgtacggatcattgatctgagtagcagcttgctgcatccttgcaatgttctcaatttcagccgtggacatgtacttggatctgaaccgcggccacccattatccatcctcatactggcaagctcaaaaccttgggggagataatgctggccatgcactccatggtgcagcattgctcttgctctcggatcactcaagtcaggcattgccaaatttgcatcaaatccactcatcatttgtgatgaatgctgaggattgtacatctgacgaccttgtggtggaggatgccgaggaccaagcatctgagcatggaactgtgagaattgtggcggagagtgttgaattggggccattccatgttgtggacggcgtgacagcatttgaggtgggaccaatccatttggacgctgcagattgtgctgcaccaaacctggtgtaagcatggcaccatttggacgaattggcccactgtttagagcattctgttgcaaattattagttgataaacctgctgaatccaaatgagccatgttccgaccaagtggccctggaggcataccaccacgaggaaactggggatggtgtaactcattttgtgcagatacaggcatttggaatgaagtgggaggagatggcatgttcatgtgatgtggttgacctggtgaagaatgggatactgcaccagatggagggtacgaaatgaatgatgatttaggtaccggaattggttctgtgtgattgtattgaggctcttgttgtgggtatgatgaagttctatgcaacagatatggcattgctccaagaatatgttcattaggattgtattgagcatcttgctgcggcgatgaggatgttctgtgcagtctagaatcagcaaagcgggctaaatggggtggttgagaccaccggctttcattatccagcccttgttcagctccaaatataggctgcgtaggccaatatgaatcttgtgcccaatccggagtagaacctagacaaattgaatcattagaatacaatgttaataaaacagaaaccatatataatcctgcagtacccaacaagagaacaaagactgtgcaaaaatgtattgaaattcacattctaacaatgaaaaattaatggatatgtccatcccattggccagatgtaacgaatcgaatcttacatatatccttgaaaaatgaaataaatcaaatacccatgcacgtgaattgaagaaacacataaagaagtagcaaaggattccaattgcaatcgagcaaaacagggcattactcactttgtctagaaattgaacccccatgactaattatgcccgattgtgttggttcattgatgcttctggtcaactgagtggagaaatcaacaaatcagttttcacagttaaaaaagaataccacaatgcaagcatacaaataggtatacaagagtttgcaactttatttaactataatctacattctgcaatttctaccaaaaaaatacaccatgtttctgttggatcaaatcccaataattggacatttgtgtattaatactatgtggctacaaagctatgcttttcaaaaaagcaaacctttgagaatgctccagcaagatcatcaacaccagtaaatgaacctccaccttcatcctgcaaaagcaaagcttgatcagtgtgagcagctgaagctgataacttaatttgcaacataaataagtaatagcgtgatactgcaatcttctaaggtaaacagaagcacataattctaaatcacagcttaatctgttatttaggccccaacactaagtgaagaaaactatgacaataacataacctggaaatgatccagataataactgcactatttcctgagctaaatttgctcagaactacagataatgagataaaacaacctctagtataatgagaggtggacttgtgttaataaacaactctgcagaagagaaattacaagctacctcagattgcaaggcaacttttttggtgaaatattatttccactaaaataaaattaattgaactctacaaagttttcaagagtagcagtgtgcagaaaatccagtagttttctataacaggtctactagacattttttacgggcacgggccaaagaaagcttgaccagtaacatatgccttccagagccaactcctagatccctttggtccacactcaggcatatacgaggaatgaacactccctgcctattgctgcataattgcctgttatgaaatataatcattacctatgtaacaccaacgcaggataccagtaaaacgattttgtgatcattctcagctactcaataaaataacaggtaaactactgagggtcccaaaattgtatacataaaaggcctaaatacacgcacataaggcccactgcttcctgcatgctgttggccagtcagcaaacctatattgaaataaagaaaaatgaaaggagagtacactcaataaagtaacctatattaacttgacacttggagacatgaagccgtgctccgtaccacgtgactgcagttgccaaatgttccaaggcgcattctactattatgttcccttcctacttcacccagtcctctcccccaccattacatgccaagtttccagctgttacccctcctccaattccccaaattctcgaccttgctatcagagatagcaaatctgcttctatttcttctcccccaggtgatcgtacttaccatgaggtgatggcaggggaaaggttccgatatgttgtatgacatgcaaatcgtgtagggaacagcagtttctgctgaatcagtgatccttggatagctactagggggggtgaactgctgcgtacctatcataaaattttgaaccttgattttattctctactaaaaaatgaagccagttctctagctcaggatccagcttggctcaaactgagctcacttgaagtttaatgtgagcttagtcgatgcaaggctcatccatgcatcccacaacccagccatatcacattggtggagataagctgataaggcagtcacatgccacagccacaaatctcacggcaaatctctcacatctctcaattctttagtagacaagcgtggtgcaagctgcgagcaggagaagacgggtggtgcattggcgcaggcgtgcaggcagcaggcaacatgagcagccagcgtgagcaggcggagagtgaggctagcggcacgggcagcatcatggactgggcgctggctccgtagcccatcagagtgggggctgtgcgcagggcaggagctctccagagctggaacccccacagctgcacctcagcatgtcaacgcagaggctcgacagcaacgcaagcgcctgtcgccttattatgagattcttcggtaaaaaccattcgctgtaactaccgaaccgattttatttggttttttcggctcggtttatattcgtaaaaagaaattcctcggtggctattatcgagaaaccaaattttatgaaaacagaagaaatcgacctgactaaaccgatgaaacagaacatcgacccctacctttcaacacagtattttcgttaaattctgtgtggtaaatatggtattatttttttggtaaatacattatatttacaaaaatacagatcgttattgtgctattggtagatacaaattgtttcggttccacactggtaaataccatatttacaaaagtttacggctttacatgatctgtaaagctgatcctcaactcttttttaacataattacaaactaagaatgacagctgacagttaacaaatgagacgagaaataaatccatgcatgcacacaaccacatgcaggataataaaacagtgacaatcactcaagcagcttactgatgaacatgaacaagcaatagtaggtgcttatgttggttttgctgccagtattggccggtcaaaacaagtggccgctaattgttggaaagttggtcaactgggcaactgagccaagaagactatcaatctgggcttgcggagacagaaacatgtcgcagcacacaagacaccaaaaggccaggttcatgttattcagtattgttggtatattcagtttctagccagtttttacccaataaagcaaaatgtcaaaacgtgttctcaaacactgtaacaaatactgatcaaacacagttaaccagtgcagattgggatagttacgaaacaccccaactcaacacaccccatttgctactttcctagtccatcccaaatttacccttctgttgattggctgcttctctctgctggatgctacagcagtcaatgcctaacaaaggtgctatctaacctgaagtgactctagaaaatgaattgcaagggcgagcagaaatcatggtagtgacagaaccaaagaaaagttccagcaataacaatggcaagaaacaacaatgtctaagcttagctctccctcttcccttcctcaactgatgtccctctctcctttcaatggttgacacagcatggtccaaggcttccgcatcatgagtccacagtctcagggactatgtgcatcctctgaagctaccataacaccgatgcttactatttactcttcattcaacataaatctctagtgttcgggtggaccctgctacctcttactgaaccatgatatacaaagtattaattcccgttggattgaacaacaacgaaaacaaacaagaagtaaaacggaatgatcaaaataacccctaggagcacctcccacctctctctctctcatgttctgaacacaaaagggcgtttactaccaaagtcatgaatgctgtgggaatcacaaaattacatactggacacactgtgtcataaaaaaaacactgatttcctgtgaaaaagttcttttaaacggaaagtaataaataatggatggaagtttgtcgcatcaaacataaatgaactgtcatatatattacctcaaacatatcccttccataagcagaagggtattcttcatcaccagggccaacaaaaccagcatcgacaccatcatcatcctccaatccacctagctcaacctcttccaccgcgttgttcccaaagaaagcatactgcgatgcatcaaacttggtagcgcctgcacagagccagagacaatcaaagagcccgggaatcagtactgaatggtacagcatctccacactcctttcatttaaaggtaaaaggagaagctattttgagttgggattgtttgttggtgtgctccacccctcaagtgacaacatatttcgtggctagatctctatatacaagtaacaaaacgaatcaaacaacccaaactaagtcacctcggttagctagctaatccggccacaagcataaaccgtcccaaacactaataatccaatcaacgagaggaaagatcttctccatctaggggcaatctacgagaagagacgagttgcattacccgtcgacgccgacgaagaaggctgcgccgccatccgcggctagggttgccggttgcgccagaagatgtggggggacacacaggaccacgggcgcgccggcggaacggagcggcggcagggggcgccggagcggagcggatcggggagggagcgagctcgagagaggagatggcggagaagacggcggaggcggaggaacgccgacgaggaggagagcccgctcgagagatagaatcaggattcagggcagaggggaattttctttttttttctttctttcttttttttttttttggctggtatatgtggggacacgccgagacagccaattcgtcagagagctgcggcctgcgggcaaaacgtgcgaactttttcggtttttttggaattattattacgtgcaagtttgattgtagcggtaaaaataactgaagcgtatgtgccgttctgatgatggtagaggtgaaaagtgcctgaggtgcaaatttcagaagctaagtggaaggtggtgaatatgtagaaatatgttttgacgagtttttaaatatttgaagatattttgttatgcaacgtttggattttatttgatatctattatctattatctatctattatatatatatataggtaaattatttgatgctccatggagtatgggctccaaaatcatccaccatccagctgctttaggatttgtgcaaaccaaaaactcagtgttacaaaaattagcgggttttacccgataagaaagatctatacgtacattccattttttttatttgcatgcatgtatttccactggtggagaaaccatatttggtcggtcgaccaaaatccacaatagtcccggttccactaaaaaccgggactaaaaatcatctttagttccagttagtggctacagtgggcatatttaatctttagtcccggttggtaaagatcatctttagtcctggtttgtatgttgtcaggggctgtcaggccctcccgtgatctctagtcccggttggtaacaccatccgggactaaaaatcctaactttctttactcccggttggtaacaccaaccgggactaaagttaggatttttagtcccggttgttaaacaaccggtaaaacaaagcctctatccacgcgcgcgcatgcaagtctcttattaattccatcattatctcctcctctcccatccagccattctctccatcttatcttcttctctcctcctctcctcccatccttctcttccttcttctctcaccccatctcctcctcccctcccttcccctccggcggggcggcgtgatggaggccggccatggcggccccggacggggcgacgggatggaggccgccgccggcggcctggcgcgaggcgacgagatggaggcggcggcgaccggctgtgtcgggcgggaggcggcggccgacgcaggtcgggagggcggcggccagctgcgtcgggcgcggggtggcgagataggggcggctggcgccggtcgagggggcagtggcgggcggcgggccgtgggcggcggcgggcggctggccgcgggcggcagggagcgtggccgcaggcggcccggcagggagcgtggcggtggcgggagctggtgaccggcggcaccctctcctctaccggaggggggaggcggcagcgaagcacaattttcttttttttcccaaatttgtgatacatttggatataagaacttgtgattcattggatctgtgatgtttggatctgtgatgtatatgatgtgtgatgtatttgatgtgtggatctgtgatgtatttctttaagaatttgagttgtatttttttgagaatttgtgatgtgaatgattcattgatttgggatgatactttgattttgggatatttggggagatttgggaaggagcaactctttggaaagaaacaataaaaataaaaaaaaagaaaaaaatggtgaccaaccaggactgcgctgctatctttagtcccggttggtgggactaaagatggatttttagtcccggttatttaaaccggaactaaagatagtgatttttagtcccggattcgtagtcccggttggaaaaccgggactacaaaggggttaccaaccgggactacaaaccatctctccaccagagttccaaataaagtatatatggattctgaacgtgattatgacaaaattatgcccgtcaattacgttatccgttgaattgatttctttccatgtatacagatttggacgttcattttttctgtgtatatatataccatccgattccgacggtattgcaaattgtagaatttagattagacacatatacatgcgttcgaaaagattagatacatacactcgatcaaggtacatacgtccttgtccgcttgtcgtcgctgcgagcttcgtcgccatgccgttacgtcgctgaacgtccgcgaggttagtcgtggccgccgtcgccggtcaactgtaatctttcgtggccactatcgatcatccatgaggatcgtgcggtcgtctgtgaggttcatcgtcgccgctgcggtcgtctgtgaggttcgtcatcgccgctgccggtcgtctgcgaagttcaccgccgccattgaaggttgctgcacatgctgagaacatatctactgcatagcaaccatatgaagcgcgtatacaggccggagcaactcagtaaagccggaagccacatcttggaaggtatatatggaagaaatgtaagccatcggagtactaagcatcacttgtttgatatttacgtgttacacttacagtgtaatctatcttgaaacagtgtgtattatactttagttagcacctcatttttgttatttcagtatccaatccgaataatatgtttgtatggctgcattatcaacaggatacccagaaattaaatcagttaaaatgttgatttgtcaatgtgtgtcattcgatcgttttctctaaatctctactgtgattactgattaagttattagtgacagcatatactcaaccatcactgattaagtccaaaggggacacacacccaacgacgcacaggatgaacataatccggattgaattctttacataagtatatccaatcggttttgctaatttgcacgtgtgaacgtatcggaatcgggagtatttatatgtcaaaaaatatttttaggcgtgataatttagtgtatatgggtatttacataagtattatatgattaatgtacacctcaaaatttcctgcggcggagacgtgagcttctccaaggtgtggcccaggtgccacgctgccacgtgctgtgcgcgccgccgtggtcttgccccgtgcgagcagcagccgcagcggccagtggcggcgtctctccgtctcaagcgaagccgggatatatccaggtacacgatggtcggcggtggcgtcttgtttgctctctcttggggtatcacgcctggtactcaggtaccaagttctgatatctagctaccaactcgatactagggtataaggtaccagctggtacctgggtaccggatagcagttaggagtcacttaaagtaccctgtagtaacggttcccgttgtctagtctctctctatttctttacataccttgaatttttggcacagacactagttataatacgatttttgggtatatgacatgactgttgggcacatacactaaataaaataagacacatgatttttatgtatatgccttgaatatttggcacatgccctgaataaataatacacgtgatttttgtgtacatacgctacactaaatacataatacacatgaatttctagatacatacactaaatatatacataatgcaccgattttttgcatgtgccctaattttttttatcacatacactgaataaataatacacgtgatttgttgggtatatacctaattatttaaaaatgtgtatataccaaatatacctaatttttttaatgtgtatataccaaatatacatattttgttgggtatatgccttgaatgggtatataccaaatcgatgtttaaatgcgtatatatttaaatgtatatatacctaatcgatgtttaaatgtgtatatacctaatcggtgtttaaatgcgtatatacttaatacgtgtataaatccaaatctgggtatataattattttttccttaaatttgttcctcaaaattaaaaagtgatgggtaatacatacattttaccacatacccaaaaataaatctccaagaatttcttgccatatactctccaagaatttccagctatataccatgtgtcaatcacattccatataaaaaatactgcacaacactctttattttatatggttaattcctatcatatttgttgcctaaaaattggacatgacacgtacatccgtaaggaaattactaatcatagatggcaagtatagctatttatctaaacatgcatgcatatcgttactacccacaataatagggcaattgcatgcggtagtttttaatccatatataactcattccatatttaatgtacaaacgggtgtacccgttaaacccaacacctagagcgatcaaatagatatggatcagatccaacggcagctaggtttggagcctatacaccatgaagtcccatatggctgtcccatatatatatattccaagattgtatatagatactgcattcctatcctcatatctggtgtctagacccctagtcactgccctgggttagagctggtattagagccaattgctcgtaacctccccaagccatcttctccgaaaggagggggggaagaggggtcgggtagcgtgctgaagtcacggtgatcccgaacggtgtggtggtgttctgaagtcgcgtagttcccgaacctttgatcggttgcctgaagtcgcgttgccttgttgagccgcagaaggtgtttatcggcgtaattcgttgactgagcacttatcaaaggcaaaggttgaacttaattatgggaaatattccctgccgttgactggaacacatcatatccaaataggttgatcataattgtgggagatttccccgccgttgtctggtaactacctacctatcttcctatctttcgtataagatgtctcggttggttagatcacgaagagccactgatcgatctgtagcctcgtgcagtagcgagaagtctgttggcactatgtcggtaaagaatgcttcatctatatcttttgaggatattgagaaaagtatttccaactggaagattcctaaggttaatattaaggaaatatatcatgtaggtactttttcgttacttagtgactactatattaaaacaattgaaaaaactattccaattagttctttgcatgaaaccctgcatcttctttcagaaagagaaatcaattctataagagctaaacatcaatatcactaccttcattttggtcttatacaagttgctatcagatccttaactagaaagggtttgaacgtctctgttctgccttgtctaagagattgcagaaataaaaggttcaaagattccttacttggcatggtggaagctagcctcagtaatggtcctgtttattttaacatctttcctgatttttctgtatccctctcagacacaaatatccataaagttctcactctcaacttacaaacatctggttatgaactagaaccagggagtgaaaacatctccgttacctacagagtttactacaaagccatgacaactttagcaccttgtgccaaacattatacaccaaaaggcctaaccactctccttcaaaccaatcctaataacagatgtactacccccaaaaccctgaaatgggatgagatcaccctgcctgagaaatgggttttatctcaagctgttgaacctaagtctatggatcaatcagaagtcgaatccttgattgaaacaccagacggagatgttgagataacatttacttcaaaacaaaaagcctttctccagtctagaccttctgtcagtctagattctaggcctaggacaaaacctcaaaatgttgtctatgctacctatgaagacaactccgacgaaccttcaatctcagacttcgatatcaatgttatcgagcttgatgttggctttgttattgccatagaagaagatgagtttgaaattgataaagatttgcttaaaaaagaactcaggcttcaaaagaaccgacccaagatgaaaagatactttgaaagggtcgatgaaccatttagactaaaaataagagaactttggcacaaagaaatgagagaacaaaggaagaacatctttttctttgattggtatgaaagtagccaagtcagacacttcgaagaattcttcaaaggaaaaaacatgatgaaaaaagagcaaaaatccgaagcaaaagatttaactgttatcaagaaggtttctacagaatgggagacaaccagtggaaacaaggtagactctgttcatcctccatttgaatccattcaattatctcataatggaggaaaagcttgtccactaaaaagtatttctaaaaatacatatggagaaacaacaaaggttgaacacataggatatttggtagaacaacaaaattatgcaaatatatctctacgttctcttggtcaacaaacagatcgaatagagacaatccttatggaaggctacaaaacaggaagacctgaggtaaagataaatattcgctctaattctcagtcttctagttctcagtctgttagtcctatgtttgtcccaacaattgatcctaacatcaaacttggaaaataaaaggcttttggacccacaatttctgaagaactagtcagtgagctagccttaaaactaaataatttaaaagtaaataaaaatatcaatgagatttctgataatgaaaaatatgatatggtcaacaagatttttaaaccttctactcttacttccacaactaggaattattaccctcaaccaacttatgcagacctacagtttgaggaaattcctcagattcaaaatatgacttactacaatggcaaagaaattgtagaatggaacttagatggctttactgaatatcaaatctttactttatgtcatcaaatgattatgtatgctaatgcctgcatagctaatggaaacaaagaaagaaaagctgccaatatgattgtcattgggttttctggtcaattaaaaggatggtggaataattatttaaatgaaactcaaagacaggagattctttgcgcagttaaaagggatgatcaaggaaggccattgcccgatagagatggtaatgggaatccaaccggtaacatttctgatgccttagccactttaatctataacataatttattactttgccgaaaactatcatgatatctatgaaaaaaatagagagcaattgataaatttaaaatgtaaaacaatgtcagattttagatggtataaagatattttcttgtcaaaactatataccctaccagaacctaatcaagacttttggaaagaaaaatatatttttggtttacctcctttatttgctgaaaaggttagaaattcccaaagaaaagaagggggagggagtataaattatcactatctagatattggaaaaatcacacaaaagatacaattagtaggggctgagctttgcaatgacctaaaaatcaaagatcaacttaaaaaacaaaggattcttggtaaaagagaaatgagagatttttgctatcagtttggttttcaagatccttatgtcaatagaaaaagaaaaacccattccaaacctaggacaaaaccaaatgataaaagcaagatgagctttcaagctaccaaaagaaaaccaaaaagaatttacaataagaatataagaacacaagacactgaaagcaaagaaaccatttgttacaaatgtggcttgaaaggacacatagctaacagatgtttcaaatccaaagttaaaaaagagatccaagccttgttagattcagaatcagaagatgttaaagaaaaacttgaaacaatactaaataatatagacaatgactcatgttcagatgaagaaaaaaatgcagagattaattgttgccaagacagtggttgctcttgttatgagccagataattcagaagaagagtctgatgaaaatatactcgttttaaccagtttagaagaatttgttctcgatacttttgaaaccattcaagatccagaagaaaaaagaagagttctcgaaaaattcctttcaagagtcaagactgataaggataaactaaaaaaggatattcaaaagagcaaattcctctctattgatgaagtgttcaaaagattagatgaacagaaaaagaagaatgagaaaccagatttgatgagcctattcgaagaccaaaaaattatgaaacaagatttagaagaaataagaaagcgtctatacatgttagaattaaaagaaggattccatatggaagaaaaggacgaaccaattcaagaagatgatcaggttgttggaaccattcaaaaatatatgaagcaaaaatggtacacagaagttatgtatcgttttatagacggatcctactttcagcatatcactttaattgattctggtgctgatgtcaattgcattcgagaaggtattatccctcataaatatttctgtaaagccgcccacagaattcgtgaggcagatggaggacttttaacagtagaatatcaaatccctgaaatctatatttgcatatctgaagtttgcattaaaacatcttttctactcgttaaaaatcttaagcaagatgttattttaggaacaccgtttttatcactcattcgtcccttccttgtcacaaccgaagatattcaatttgagataatgggcaaacaggtgagcctaagattttcgtctaacacagatgagattcttgaccagcttgtttagaccaaaagagaacaagttgtgaatacaatatatttgcatgacaattctttcccatcatatcttccaaaatctatggacttgccatgtaagacatcatgggaagatagatatttattaaaagctactaaaaattttgaatatatatgcagggaaatggcttcacagaagtctgaatggttcacgaatatgagttcatggagactgccccaactgcctagaggccatggagaacgatttaatcacaatttcagagtaacagagctacaacaagggttattaaaccacttgtggcaggcaaaaaacaaaaaagaaaaagctcatgccttaaatggcctggcatattatttcaaaaatttcgtgccctcagatcaaaagataacagaaaaaagggctaaactacaagatatccctcatcatgaggagagattactagattatcgcgaggagaaatcccgtgatggccaagataaacttcccatggaagttgaacaatctatggcaacagataagaataccaaggtattctcagataagattttgatctcaacagatcctgcttcgagcatggttgctttccacataaatatcaataacctattgcaatcttttccacataataaaccatcatcatccacaaaaaggcatgataccattccccaaacaccatacatactgcataatcatcccaattcattccttccacaatatatactccggacccagccaaaagcaccatgtagatcttgtgcctacaaagattcttgccaaaagaaacttaaaagccaaaatcccatgagtaccacatacgaaaatctccaacctagattaagcttcaagacggagcaaactttatcttgctttgggcaagacatcctcgatcttgtttggcaaaagtttaaagagagacaaatgaaaatattccttggactccaagattatttctttgatctcttagaaggaagagaaagaaacccagccatacgagtaatcatatatatgctccctctcttaaggctagatgatcaggcaatctctgacccatcctatagattcctggttctcaaagctgagataaatctccaaagattccggaacctacccacatacaaccatgaagaaatatctctccaaaccattatagatcatggtcttgtgaattccatctatgcaaccctcgatcagatccttcaatctgattttggaagcgatgtgaaagatgtctgcaggagacttggaaatggaagatacaggattatcttctcctccataccaccaaaattcacaccacctgttcgtccagcaattcattatatatatatcatgaatggacaatttaattttcaagaagacggtcctagcaaactatcggatgaagaggaagaaatatatacaacaattgctaatcatgaaaattggagattattttctgaagctgcagaaattgaagaagctatcaccacagattatgaatatcagctggttttccaaaacaagatcacaaggatttttatcagcaaatattacaaccaaagttatgaatacttcaagggagcagggcgcataattaaaccggattttggaaatgaatgctccaagaaaagttactacagaagcctggctcagtgatttcagaaatcagagccgtcagagattgacacggtgcaatcagcacccacgataatcaacgaagataatgaataaagatcttgtcatccccgacaaagatcactattcaagataaggaatctacactattccagataagataagtccatagtcaaaaagcgatattatgacatctttattaaaggtctaaagcgttatcaccaaagattctctccatgaagtctaaaggggtatcataaactctttaaggtcaagaagagatatcatgaagattctctaccgagcgctatataaggggctcaccatcacatttcacaggcatcgcatttcacacacaacacatctcactcaaccattcctctcacctctccaccagccatcacactccactccactccaactaagtgttagtactatagtagaacctaaataaaagactcatgagagtctaagtgtgagagtctatgtaagagtccttgtgagagtcctgtacctgtataattacgaacgtgttgtaccaagtccttggtgtaatcttcagaaggatctaccttcaacctatcaaggtatatgaatgaacacctggaccgttctatataaacctattatgttctaaatatctaattttatatcttgtacataattcgtatttacagcttatctttatttcctgtactgcattcatgtttgcataataatataaaaaaaaaaataaaaaaaaaaattaacaacctggattgccatccaattgtcacgtactaatctcacatccaagattgcatatagatactgcattcctatcctcatatctggtgactagacccctagtcactgccctgggttagagcatttcatgcaaagaactaattggaatagttttttcaattgttttaatatagtagtcactaagtaatgaaaaagtacctacatgatatatttccttaatattaaccttaggaatcttccagttggaaatacttttctcaatatcctcaaaagatatagatgaagcattctttatcgacatagtgccaatagacttctcgctactgcacgaggctacagatcgatcagtggctcttcgtgatctaaccaaccaagacatcttatacgaaagataggaagataggtaggtagttaccagacaacggcggggaaatctcccacaattatgatcaagctatttggatatgatgtgttccagtcaacggcagggaatatttcccacaattaagttcaacctttgcctttgataagtgcccagtcaacgaattacgccgacaaacgccttctgcggctcaacaaggcaacgcgacttcaggcaaccgatcaaaggttcgggaacttcgcgacttcagaacaccaccacaccgttcgggatcaccgcgacttcagcacgctatccgacccctcttcccccccccctttcggagaagatggcttggggaggttacgagcacttggctctgataccagctctaacccagggcagtgactaggggtctagtcaccagatatgaggataggaatgcagtatctatatgaggtgaacctgaccagctgctctctggaatcctttttttgtttaagaattcctccataaccatgatctgaggcatctgattcgataattttgaaggcatcttgatctaggatataaagacagtgcaaggttttgaccttacctttgatcttcttaacagcttgagtatgtttagctgtccaagctggaggctttttcttcaacctctcggttaaaatctttctgtcttttgcaagatctttataaaaatcggagacatagtttaaacaccctagaaatctttgcaactgtgttttatcttttatctcatctggaaatttttctgcaaattctattactcttgctactggttggactcgatcatattgaattttataaccgagaaactgaacattagtttggaaaagtttcattttcttagcagagactactaaaccgttttgaactatgattttataaaatatattagggtgtttccaatgttggtcaacatcttgggaaaatattaaaacatcatctatataaactataataaaggatgtaaagggaaggaaaatctcattcatgattttttggaactcagaaggagcattttttaaaccaaacggcattacgttccactcataatgaccaaaaggagtagtaaaagcagttttatatctatcctcttcttttatttggacttgccaaaacccagacttcatatcaaatttagaatatatctttgaaccctgaatcctttgtattaagtcatgcttataaggtattggataccttatccattgtagaactttattgaggggtttgtaattaataactagccgaggaactcctcgttctttttcagcagcattttctacatagaaggctgcacaactcaaaggagaggaacgtttccttattaagcttttatctagcaggttttttatttcttgcttgcaaatttcttaaagtcgactattcatctgaatgggccttgctttagtgggaatcttatcttcattaaaattagagatataaggaatctttgaaccttttatttctgcaatctcttagacaagccagaacagagacgttcaaaccctttctagtcaaggatctgatagcaacttgtataagaccaaagtgaaggtagtgatattgatgtttagctcttatagaattgatttctctttcagaaagaagatgcagggtttcatgcaaagaactaattggaatagttttttcaattgttttaatatagtagtcactaagtaacgaaaaagtacctacatgatatatttccttaatattaaccttaggaatcttccaattggaaatacttttctcaatatcctcaaaagatatagatgaagcattctttaccgacatagtgccaacagacttctcgctactgcacgaggctatagatcgatcagtggctcttcgtgatctaaccaaccaagacatcttatacgaaagataggaagataggtaggtagttaccagacaacggcggggaaatctcccacaattatgatcaacctatttggatatgatgtgttccagtcaacggcagggaatatttcccacaattaagttcaacctttgcctttgataagtgcccagtcaacgaattacgccgacaaacgccttctgcggctcaacaaggcaacgcgacttcaggcaaccgatcaaaggttcgggaactccgcgacttcagaacaccaccacactgttcgggatcaccgcgacttcagcacgctacccgacccctcttcccccccctttcggagaagatggcttggttggttagatcacgaagagccactgatcgatctgtagcctcgtgcagtagcgagaagtctgttggcactatgtcggtaaagaatgcttcatttatatcttttgaggatattgagaaaagtatttctgactggaagattcctaaggttaatattaaggaaatatatcatgtaggtactttttcgttacttagtgactactatattaaaacaattgaaaatattagttctttgcatgaaaccctgcatcttctttctgaaagagaaatcaattctataagagctaaacatcaatatcactatatatatatacatatatacatatatacatatatacatatatatacatatatacatatatacatatatatatacatatatacatatatatatatatatacatatatacatatatacatatatatacatatatatatatatatatacatatatatatgcgcgcgcgcttagagtcattaacatatatataaatatgggcaatgctagaaagccttataattaaaaacggaggaagtactaaaagtccattaaacttactataaacactctcaagccaccacgtggcacttttacaaacgcttctggaccgccacgtgacaatgcctaatctcaccgtcgattttcacttaatcggtggacccgataatttagaccattaaattagattagatgtattttatttaaaaagaaactaatacctattgttcaccgaaaaagaaaatagaaactaataccttgctgttcaccggaaaaaaaacacaagtattcaataggtacgtacatacgactaaaatacaatgtatcttatctactgtttatcgaaaggaaaaaaaaccatacgtagtaccattaaaaaaatcaattatctttaaaatagagttttctactatttaaagataaaatctattactctataaatttaagtaaatatcaccctcgattttcacttaaattgatgaacccaatatttagaccattagagtattttattttataaactaataccatattactctgtgtacgtatactggagaactatataactattaggatagaaaaacaaaaaaaaacataagttgtccgtacatacatatgacttggaaaaaaattggagcttacctactatccattggaaaagaaaaatctatgcacaatggtcttttgaaatagtattttcaaaatcccttactataaaaacaataaaacaaaaaaatgtgtatcattcgaaaaagatcgatggtcttttaaaatagtattatctactatttaaatataaatatattaccctacaaatttatgtaaatatacgtagttaaactaaatttatattataaatatgaaatatcccatgaataatctttattcatcctatcttagcatacgaggatgatatatataataattattgctatgataattttttatttcacatcttgttttagggtttcaaatatcacttgacaaatatacaacactaatttaaatctacatttataaaaaaaataaaaacaatacaatttagttgtttcattttacaccattagattaaatttattatttttaaaatgttacttaaattcatgtatagcatacaaaataaaaatgttatataaagtttggaaagtccaaaaatttttagaaaggaatcacacataattaaaatagatatgaactaactctattattatgacacgtttttcctaatagatatacaatttcaagtaatatgcccaaaccagttattaacaaacatacgtttaaaatagtgtcaaaaaatatttcaaaaatatcatccacacataaaaattcgtaataaaagttcaaataagattaaacaacatacccacgcgtatgcgctggctaccttcctagttttttttaacatataactatttctcgatatagagccagtgtcaccgtcatgtgtgtgtatgtatatatacatatgtgtattaaaattaactggggctccatggtgctcgggctcgaagattaaaattgagtatatacccaattttaatgagtatgattttttaaaaaaatgtttagatatgaacattaacttctttactaacaagttcaaataagattgaactgagtttggacatttttttggttagattttggttctaggtatataacattcaaacatataattagttaggtatgtaataatgaattgtgaaataaagttgagtttaagttgtttgttgctaggtataggtatgaatcaaattcttatacctatgtatatacttacgatttgatccattcaattgatattctattttgcttcgactctagtctaaatagtaatggtactatttaaaggttgttttgtttttgaatatttgatctaccatgagagatattgttttgcgtttgagtatttgatctaacatgatatatttttttatttgatccttttttatgaaaaattctaacaagctttgcctaatagttatatatttaaaacagtaaaatatttaaacgcaagagtatcacatcaaaataattattgtaaatgttgtaatcagtcaaaaatgactaaattaaggggcttattcatcttgcacatatgcaagagaatttcattgttaaaagaatggaacaaattgtcttcttctggtaacaatttttgaaagattatttcatttcattgcttcaatatatgccagcaagctatgaacattatatccaagaaactcttttgcctaaacctcggtcgtgccaagaccaccatttggaaaaactcaagattagcattccatcttactctaatacggtctcgacacatgatcgaagaagggatgcattgttgtctccctagaaccagtaagcaaagaacacaaggtagatctgcattctagagcacaatagttttttgtgattttgtccaacgtgtctccggtattcaatcgatcatacaacatcagccacataaatactttgttcttgacgacacatttagttttccagagccaaatggtgactagggggagaatgattcacaaaattcagcccgtgaaaattctgaggaacaaacacggctgttccatatgacagactaaggatctccctttgtatttgaagttgtaactcattcaattcaacttgtagctgctgaaattcatctaaggcttgagcaggtagaggtaagttaacactatcttccaaatgttttgtcacatatggatttgactgagtcccacccgaacaatctatgaaaatgtctaatgtctccattccagatatcatttcaagtaaagatctatggtgccaaatattgtgcattgggctatagttttgaagatatctactagcatgcattatgcaaccatgtaagaatactttttctccaaaactattcatctaagataagattataccgctttatttattacaattaaattttttgtcacatgattatatatttgcataataattttgaataagacaaatgatcaaacgttggtcaaaaagtaaacggcgtcatacattaaaatacagatgagtacgtcacaagggggtgaaaaataacttgccgctgctcacattttttgaaattttacaaaattgtggggatagatacaaaatcactcaccgtacgtggtgtcctgtacgtggtgtcctcgttaactagatgcgtccacttccttcccccacgccgcccaaagtgcttcacctgcaacaccttgggcaagacgcttacgtccatcttgtccaacccggtcggcccggagaaatctcgccggtagatttcgcatgatcctgccgtctgcgccgcatcgtcggcgtcttgttggaagaagcagcccttgtggtagtatctttgcatgaacctcatctgcttcttgatcttcatcttcttcttgggacgatcagcaaccgggttctcgtcttccatgatcgacttgtcgtcgtcgatgccgctctcctccctgatcctcttgatcctcgccatctcccggcgccgccacgactcgtactcctcggcttggtccacctcgtcgtcggtgtccacgccgttgatggcggcttcatctgaagctgtgttggcggcgaggagctcttcgttgatgatctcttggagcaggatctgcctcgtctgagccttcctgtcctcgagcctcttccggtgcagctcgtcctcaagtcgctgccgttcttcctccttgagccggatggtgtcacgccgcggctttggtataaacagtggcacggccatgtagacgacggccatctgctcgccgacgtcggagtccgattccgccgtctcttcagactcagacgcctcctcatcttcctcctcctgatgctgcgggtgaagaagaagaagctgctcctcctcatgccgcctcaggagcagcgccctctcccttatcctcgctctgcgctcctcccgggcatcatcatcatcatcttcgtcttgttcctcctcgatcggatcgggctcgtgccagtcatctaccgccggtgccgccgacgcgatctcgggagcccgccgcacacggcggcggcgcggcgacctcagcacctcctcctccacgtgcttgatctcgtcaagcgtcgagacgagacgtgcgtcgtcctcgtcgtgagcgacagcggcgcccgcccacgcccagtccggcgccctcccgggccagtagcgcctgaccttgctcaggccggtgtcgccggcgcgcgccgccatgcctagcttactgctggtctcgctgctcttgtgccacgcgctagcagcaactagcaatcaggctaatgcatggagtaaggagacggacagcggctataaataggcgcgcgcggcgcgcctacgtgtaatccgagtcggagatgggaaacgcgcgcgcgcggcagtacaaagcgactaaccgagtccgagttgatttgaaaaaaaattggtgcatacaccggtgcaaagcgaagcctctgcagccccgggcgccgatggtggacgcgtggataaaaaagagatcgaacggcgagcacgatttgcggacgcgctgcggcgatcgctccctcgccctctcacctcaatcggaccggaatcacctctcgccgacgccgtcgacgatagtgatggtaggacgaggaggcctggagaagaacagatcgacctgccgggcttctgccttcgtctcatcaggtgccggctggtttcacctgcgctgcgcatgacgacaaggagcaatggatttactgaattttcattgatgatattagttgcgaccatggatttattagttacgttaatacggagattgtgacttattaacatgtaaaaacttgactttgtggcgaccagttcttgagttgctcttaattatcctcatcttttccttgcctgaactcaccttgtgagttgctacttgttcttattaaatttcttcaaaaattcagattatacaatattccgtattttattcactcacgtaattagataaacaatcacagtttttgtaacacatccatcagattgaatatttcagaacaaccaaaaacgctcatatgtattccagatagaaaaatacagtctacagattacaaagggataactcagtattcttgcaatttgaacaaaaaaaaaaggctgttcaggttacaatctggacgactggactacaatccttgcaacaatttagggattatttcatattacaaaggagtgaaggactacaattttttcaacaccatcctctttttccaaatttacagtcctttcaggtatagcgattttccctcttctgtatatattctgcagagaagatagagaaccaccatcataaagataaatcgaaatgagaaatgcataagttctgctgttatcgggaacaccagaatcaggaataagaatcatatcaacaaataatccatcaggcagaataatgttatgcgatatgcagaacaatcatctagctctcaactcttaataatgcattatgaacaaactctgaataatgttatgagcaattcaccgttagtcagatacagatacaggttgttgtagcgggcatcgcggaggaggacaaggtcgggctggttgctcaccatttgatcgatggtcgtcggtcgaggtgctgtgtttcatgcgagaccgaggtcccagaccatggtagtcctccccgtccccgatgcgcgcacaaacgcgtcccggcagcgaacgagagacaaggcggcgcgggaagggatcaggcgggaggtggatgggactgcggagggagttggaggggaacacgtcgggaggcgacggatttggggttacggcggagatggcgccggcaagatgagaaaagcggatctgaggccaatgagtcgatacctatgcgatttgaggtgagccgagcgaggctggatttttcgcattttgatctttttagaaaacttattctataaataaatctctaaaaaaacttatttaataaatgatcctttccacggcaccaatgtcgttggcaccgtggtccaacatgacggtgtcaatgacgtcggcgccatcctcctagccccaggtgaaaaaggtaagttacaaatgtgaacgggacgacgccaatgtcattggcgccgaggaccaaattatttttttctgaaaaaggacctatatgcaaataaaaattatttaaaaataggtccttagttccaatgacgctgataccaaggacctatttgtggacctatttgtaaatattttttatttacaaataggtccttttcaatttttttacaaattggtcctcggtgccaatgtcgttggcgccgtcccacttcacatttgtgactaaactttcacccgagggcggagaggatggcgccaatatcattggcgccgtcatgttgaaacatggcgccaacgacattggcgccgcgacaaggatcatttctagaataagtttttttataggtctatttgtaggataagtttttaaaaagtactaaaatgtgaaaaaatccagccgagcaaggctcctccatcctcgggtgtggctaatgggcgatcgatcgcttatcgatccccatcctccctatacgctctctccccccttcctcctccccttcttttcttcctactacaccataaattaaaaaaaaataaaaaacaaagttgaaaaaaattatgtatagaaatactatatataaaaaatatttgaatttaaatttaaatttgaaacgggtatgtaaactttgggtctataaactaatatttgaattcaaattcaaatttgaatcgggtatgtaaacttttgatttataaactttgggtctataaactttaggtgtataaactttagatatatagaaatactatatataaaaaatatttgaattcaaattcaaatttgaatcggatatataaacttttgacttgtaaactttgggtctctaaacttgaggtgtatgttaggattatggataaggcataccctctaacctacgacttatgaaatataccgataaggtataccttcacgtgcacgggtcgtttccgtatacaccgttaggaatctgtcccgaattatgaaaaatatctctacgagttaagaaactatcagagtcctacttggaggggatagaatatctgctatatcgtactagtttacatatctccaactcttacttcgggtaagataatccacggtataaaacggacccctagagggaggtgaagggcatcaaatatcatcgccaacacacccaccacagcttacgaagccgaagtattcggagccaagtcaccgggagatctcgtcgaatctatcgactatgatctcgtcggtcccgtcgaatctattgactatgatctcgtcggtgtcgtttgtttcatctactctctttgtaatctgttctcatcatcatcaatctcatataaactagactagggctattacctgataaggggcctgaaccagtataatcctcgtcttctgtttgcttgatgttgtactacatagaccctcattcaaacataccccaatactcaacttatcctgtctgcgagtatcactcgtcaacagtatataaactttagatgtgtaaatttgaggtcgtcgacagtgtataaactttagatgtgtaaatttatgatgtacaaactttaggtatataaatgtactaaaatagaaaagtaatgcggtgttaaaataggaaaccatatggagaagggtgatcgatcgatcctcaccatatatatcgcgctgcataggagccgaggggagatagccgtctgatcaccacgtcgtccacatggcaatcatctggagcaggtctgcagttctgcagttctgcaccaaatttcttttccaagttttgaagtcttggagatcaaatcagataggagtattgtacgtgaccccaatgaccgccgccacctctcgcggtctaccctaaatcaatctaattagtaatacttaggggtggaaaaaaagcttgggctcgtgagcttagctcgggcttggctcgagctcacttagctcggttcggcttgaatgccaaacaagccaagcccaagcctcctttttagctcgtttctgaaacgagctaagcccgagctggctcacgagccacttgatttggctcgtgagcctaggccatcatatatttgtatggatgattttattttgcagttgagttattatttgtcaatatataatttatcgtctagattttaatgaattgaatatataaagttattttaattttacatgttgataatttgttattgcttttcttaatgattataaattatatagcttcaacggaaggttcgcaagctagcgcgagctggctcgagccaggaaacgagccgagccgagctcatgttttagctcgtatccctaaccgaaccgagccaagccaagcctagcttgttacgagccattgcaagccgaaccgagctaggcttggctcggctcgtttccacccctagtaatactacctctgctattttctttaatagataataccattaatttttaaaataatgtttgattattcgttctatttaaaatattagtgtaaatattctaaattataagtcatacttatagtttctttaataataataaaatatgtcacaacaaaataaataacatttatatataacattttaaaacgaatgtggaaagtcaatagtataatttaaacggagggagcaaaactactgagcagttgactaatgatgcagtaggattgaagcacttaggggggcgatcctaatgggcgatcgatcgcctggagatgggggtagcgatcgccccacgccccccctccacctggtttccttttttaccaccgcattactttcttattttagtaaatttatacacctcaagtttacacatctaaagtatagagacccaaagtttataagtcaaaagtttatatatccgattcaaatttgaatttgaattcaaatattttttttatatatagtatttctatacatctaaagtttatacacctaaagttagtttatagaccaaaagtttataagtcaaaagtttatatattcgattcaaatttgaatttgaattatatctgattcaaatttgaatttgaattcaaatattttctatatatagtatttctatgcatctaaagtttatacaactaaagtttatagacccaaagtttatagacccaaaatttataagtcaaaagtttacatacccgattcaaatttgaatttgaattatatccgattcaaatttaaatttgaattcaaatattttctatatatagtatttctatacatctaaagtttatacacctaaagtttatagacccaaagtttataagtcaaaaagtttacatacccgattcaaatttgaatttgaatttaaattttttatatatagtatttctatacataaatttttctaactttttgttttttttttaaatttttgtgtggtgtactgtagcaggagaggagggaggagtgtatctagtagtataggggagggggcgggcgtctgatcgctgggcgggtgagggagcgatcacccgcccattagcatttccgcacttagggcttttctttagctactccctgtttttttttatacttatatactccaacgatatctttattcatttactatatatttataatttcataatataaagatggagctttgttaatccaggtgagggggagggggaatgggatggtactttatttttttatagtttttctttaaatatagatctaatggctgaaataatgattttatcgaggtcagatgcttcattgttttagattttatgtgatttttattaatttttaagatgtgatacgtagtggcttatgagagtagaatgatatatctaatggctgaaaataataaatttgccgatttaagtgtaaaatgatagtaggatgttttgcttttgtttttctcatagaatttcaacgatatttcttaatttttaggatgtgacggttgatggtttgcgtcctacatgatatttaatttaatgtacatatttatatatagaatgatttaagatggtatagttgttgtcaatttttttatttgtttaatgactgccacgctagggtctatgtccaaacgtatttcagttttttctttacctcgcaaaatatatgcaatatcgatcttaatgtatttatttaattacaaataaaaatagtacaaatgaatttaatgttgtatataaattgagaatcatgattatttagctatttaaaatttaaactattttgtaatgagtttttagaaaataggagaaaaggggagggcatatggaatacgtatcacatatatacgtacttacgtacggtggcatgtacagcaggggaagggaaggctacatattccgtgagatcgatctaataggcccataggttggattgagtatatattcctttaaaattgatctaatgattaaaaataatggatccactcatttaagtgaaaaccaatggtgagatgtttttctttttttcttaaaatttctaggatttttttctaatttattagagctccacgtggcgacttaggagcgtttgtagagcgccacgtggtggcttgagaatgtttataggaagtttaatagacttttagtatataatagaagatagatagatgacgtggttcatcctaggatcatcactagatttatttttcactagtaaatatatgtcttgtggaccaactcaattgaaagtttgatcccctattcctttttaatatttgacagtaatgaagatggctatctggtttcttttataaaaagaaaaatgatcatctggagagaaggctacctttttctgctccatctctgttggagatatgggcccagggttatgcgaagtgtggggaatctaccttcccatcctgccatgtgtccctacagcctggtcctgcccccgcagtctgcgaaccgctggagcagccgggggggtcggggcctcggggtgccacgtcatgcccctcgggcccttgcaccgctttgccccgaggcccacgcccagccaccatttggcggggggagcgagcgaggtgagggtctaggttgagcctcctttaatacgcgcaatgcctcaactaccccctgtcgcatttaatgcagtgagacagacgtgcggcgtgctaaactgacgtgccatagtcaagaatgaccggtctgtgaccggcctgacaccgaccgtgctcccacgtcgcatttgcttccggcggagtggaggtaggtatgacccgtcccatcggagggtcattcggacggcggccaccacaagtcttcacccattaatgagggaatgacagggctgtctcccgtgtcaggcgagggacggcactgggccccattcaaggacaagctgtggttcaggttccaggcgaaggcacgggtcgagttccggtcaagatagggtgggaccccacccgaaagaagagtaggtagaggcggtgcatgtggtatccccttgagatataaaaggaggaccttgcccaccgagcaaagggacgattctcaactaacttgggctctaggagaagagtgttctcccgagtttaggaacctttgtaactctcaatctaaatcccaaacacaggagtagggtattacgcttctcagcggcccgaatttgtataatttgattgtgtgcgagctagctaggggccttagggacggatacgtggtttctagaagcgagcttcttcccccggccgaactcacgaaaggggggtctcacgacctcccgctagagaggatcatccctcgacagctggcgcgccaggtagggggagggcacgcgctttaaagagaagtcgtttccttccgtcccaagtttccctgggccctcgacgatcatggtcgaggtcctggaggaggaggaggtggtattcacccccactccgtctgggagtgaggatgctagcgagagctgcggccctcgtcaccgccgccgcaactctccaactcccccccgccgtgaaccctcgcggagggaggaccccacccgttcgggtggtttggccctctccccgcccccaggtgaagggaggccacgacgcatcggggcacggcgccgcctcacttacggtgacggcggctcgccccgaggcgcgctttaggcggcgggtgcccttctgcggcatccccccgtgaactcggagccagagacccctgtccagcgctggttggacgacgtggccaacttggtcaccactgcccagcggcagttggccgcgggcggccgacccgccgtcaccggtacgttgcatacccccattaccctctcctcgtcagcaaggaggagggcctgttggtcggccatggtctcgaggcggtccacggctccaacatcgtcgggggcctcgggaagccggaggcatcacgacggtctctacagggagcaggatgctcgaatccatatcgagcgacgccgggacgagcgctgagctgcccgcatgggggaaggcgcctcctcatctggagtgccacgttcctcctcacgaggcggccctccccccacgctcacccctggagggacgggttgtagggccttcgtggcgagtctgcggaacgtccggtggcccccgaagtttcgccccaaccttacggagaagtatgatggcagcatcaatccctccgagttcctccagatctacaccacgatcatcgtagcggcaaggggcgatgaccgggtcatggcgaattatttccccatggccctcaagggtcaggcgcgtggctggttgatgacccagccccccgactccatctactcctgggaggacctgtgccagcagttcatcacgaacttccagggcacatatccccgcccaggagaagaggcggacctgcacgttgtgtggcggaaggacgacgagtcccttcgctcgtacatacagcgcttctgccaggtccgcaacaccattccatgcattccggcccacgcggtcgtttatgcgtttcggaatggcgtgcggcataaccgcatgttggagaagatcgcttcctaggagcccaagaccaccgccgagcttttcgagctggcggacaaggtggctcggaaggaggaggcgtgggcctggaactcccccggcaccggcacggcggctgcggctacccccgagtctgttccccgctctaagcgtgagataggagaggcaaaaggaaaccggcccgctccgatgacgagggccatgtccttgcgactgatgggcccgcacgggccccgcgcaagggaaagaccaccggcgacaagccgagctccactgctccatccggcgagggccggtcggcagacaagtggtactcggtgcacaacacttatcggcacagtctcgctgactgccgctcggtcaagaatttggccgagcggttccggaaagccgatgaggagaagcggcagggccgacgagagggcaaagcccccacgacctcagccgatgaccagcgaggggaggccaagaagaaggcccccgccgatgatggcgatgacagtgaggatctggagttccagatacctcagggaactgtcgccacgctcgacgagagggcttgcgctcacacctctcgctgaggcttcaaggccatgaggcgagagcttctggccgccgttccaacccacaaagcggctcgaaaggcgcgctggtcggaggtgaagctcacctttgaccagagcgaccatctgacaatgctcgctcgaggtgagaagttggccctcgtggtctccccgaccattcacaacgtcaggatgaagcgcgtcctggttgacgagggagccagcctgagcatcatctccccagccgccttcgacgcgctcaaggccccggggatgaagctccagccgtcgctgccgatcatcggcgtgactccgggacacacgtggcccctcggccacgtcgagctcccggtaaccttcggcgactccaccaacttccgtaccgagcggatcgacttcgatgtggcggacctcaatttgcctacaacgcggtcctgggcagacctgcgttggtgaagttcatggccgccacccactacgtctacctccagatgaagatgccgggccctagtggtcccatcaccgtctttggcgatgtcaaaatcgccctcgcctgcacggagcaaagcgccgacaacctagcggtggccacggaaccacaggcccgagaggcctccgcgtcccgcgcctccaagaagcgcctcgcctcggctgatgaggtgcctgtcaaggagatcccccttggcgatgatccatccaagaccgccaaaattggcgggaccctggacgccaaataggaaagcgcgctcgtctccttcctgtgggcaaattccgacgtcttcgcatggaagccgtcggacatgcccgaggtccccagggaggtgatcgagcaccgcctcgccgtgaggccggatgcgcgacccatccggcaaaaagtgcggcgtcaagccccggagcaacaggccttcatccgagaggaagtggcgcggctcctagaggccgacttcatccgcgagtatatccatccggagtggctggcgaactcggtggttgtcccgaaggccaacggcaagctctggatgtgcatcaactacacagacctcaacaaggcatgccctaaagatcccttccctttaccacacagatcagatagtcgactccactacggggtgcgaccttttgtgttttctagatgcctactctgggtatcaccagatccgcatggctagggaagatgaggaaaaaactgccttcattactcctgtgggcaccttttgttatacaactatgccttttggattaaagaatgcaggccctacttttcagcgtatgactcgtatcactttaagtagtcagatagggcgcaatatagaggcgtatgtcgatgacctggtggtaaagacgcgccaccaggacatgttgttgcaggatttggccgagactttcgacagtcttaggtccacacgcgtgaaactaaaccccgacaagtgtgtgttcggtgtgccggcgggcaaactcagttttctggtctcctcacgaggcatagaagctaatcccgggaaaatacgcgcgatagagaggatgcgctccctcggggcgacggtctggcccctcaccacttaggtaccacggaccgagcgcggatttaccttttcgcgagaacgagcccgaggggggggaaggatggggtaagaacggcatttcgatcacagggaggtcaattatatacttttgctcttgttttttctttccgtgccgtatgcattcaatggagaaagcaaaggggtagaaagtgcgaaaaggaagctttatttacagacaagaccgcacgatagcctaaagacaagtgtccgctgcaggcacacaacaaaaggaaattaaaagtgcggataatcacggagtgcccaggcccccgaggccggcgccgctaacgacgtcgtcccagtcctcgccaccgacgtcgtcaccatcgtctccgctcccgctctcctcgtccgaggcaagcccgaaggtgaaccggggggccgacccctcgaagttagagacgatcgcgtcggccacctcccggacttgctcccgagccattgcctcggtccccggggggaaatcctcgagtgcgcgccatgggacgaagtcagggtcgcaggcttggtggctcgcgaggaccagttccaccgcgacccgcgccaaggaagccgacgacgatttcacgatctcgccgacctcctcctccagcctctccagatccgccgccagcctgtccagccggagcgcgagtgccggctgtgtgggcgggagcttactatcccggcgcacggagatgccgactcggcgcctcgcgcgctccagccgatcgacggcatcggagaactgcccgggtccgatctcgttcgtaaggcggagggccgcaatctccccagcctggtcttgcaccaagcgctctaggtcggcgatagtgctctgagccgtggtaagctggctcaccaaatctgcgccgccgggctgcacgcccgcctccaggtccttctcccaggcctccagctcagaagccctcactgccatcgccgcgcactcagcgcgggcactctccagatgccgagcctcacgccggcaatggcctcctcgcgtttcgcgagttgctcgcccagccagcgtgaggccacctcacggcggttcacctcggcttcgcgctcggcgagtgcggcgtcccgttcccggcacgcctcttcccggaaccatagctcctccgcgtggcgggccgctgaagctttcacggcgagggtgatccggtcacgctcggctgcggcctcctcacgaaggcgaagggaggcctccgcctccaccgccattctctcatggacggccaaggtggactcccgttgatctagcagacgcgctcgatcctccagcgcctgagcccgcctctccagctcctgggctcgctgcgcctgctcctggctgcgcgcgtcctgctcgcgctggctctggtcaaggacctcgattcgccgacgaatcgtggcctcaaactcctgcgcggagcgggcacgctcatctaaggccttgcgttcagcctcaagcgccgccgttcgagcccgcagcgaggcatcggcctccgatacccgccgctcttgggcggcagccgcatcgaggataccgcggcatccttgaccctctttgccaggtcctcggcatgggcctcgtactgtaagcggatgtcgcccagcacttcgcccaggacgcttgaggcaatcagtgctgcctgccgctcttcctccgtctcccgcatgacagagtccagcgtctcctcgcgcgcctggatttcagctagttgggcttggcgcattttgtgtcccaccttcaccatgtcgtccacggcgcggcacccctcgtcaacccgcgcgcggtccgcagtgagctgtgcccactctgcctccaggaccgctcgctcttccgccagggcttgaacttgggcgttgagcccctcctggacggtggaattggcggcggcgagcacctacaggagcggctccaagcttgccgaagtcggagtcggagaagaaaaagttgcggtccgcccccgagacgacggagtgctgctggatcccccgcgagacagggggctgctctcagccccccttctgcgcgaccagccccgagggcgccccaagtgcaagggggagcggttgttcctctcgccccccacttcgggccctcgggtagattcggcctcggcctcgggctcgggcccgcccgcagttttggcctcggcctcgggctcagggccgtctccggcctcggcttccgggctgcgacctccctcgtcccccgctcccgggtggcgctccgcatggatccgggtctcagagccgccctcgggagggacgtcaccgccgctatcgctcgcggcgggtcgagtcccggctgaggtgaacccagggtcggactcggtgtgcggcccgtgggccccgccgggaggctgtgaaggccccgcggccctggatcggccaagtccgggccgctctgatcgttcggattttgtcccctgcaaagggtcggacctcgagatccccaggaaggaatctcactacaaaataaccctgatcgcgttaacgaagaaaaagaagaggagggaacaagagaccgagatgagtaaaaagcaccgaagcgggtgccggcagtcgtacctgcggggagggcggttgaaagtccacttcgggggctcaatgaagctcccccgacacggctccgtttggcctatcttccagagccgcttcttcttccgtccggcctcaggcgcagtggggcgcttgtggcccgccgacggtcggtccgccccgcgctcggcgccccctctgtgtgggggagagggcggtcgagattcggacatcttccgcttccctttcgggtcgctggccgagtcgaccccgggtccgcggctcgggccgggtgccctggagctgccacccccgctggggccgcttgtccgactcccgcctgtggtcaacccgccaccacccacgccgatagcgctaccaccggtgccgccccggcgggaccgactcctgctggcgccgatggccgacatcacagccaagatactctcccggtcgcggtcgctacagaggggaaggatcccgtctggaatcagtgtttgctcggcagtgtccacacccagcacccgccgaatcaccgtcttcgcgtcctcctcgccccagtcccagcgctcgcccacatgcgtgcgcatggggtcgttaggtccagtgtactcccacgcgccatgggatcgatcttggagaggcgcgatacggcggcggaagtagtcgccaaagaccattgcccccgtgaggccaaggcttcgcaggcccctgaggcgatcccgcaccgcgccgtactcttcgcccaactccgaaaccgctagccatgtggcggatcgttcgggagggccagcgggaagccgaagtcgcgggtggtccagcagcgcggtgtagaaccagtccttctttctgtcctcccatttctttcggagatggctctcgatgtattgccccgctgtgcctggccggggctagaagtaacatccccccaccaccgcgccttgcagcagctgccggacgaagaaagactggaacagccgcatcgtcggtcgcaccccgatgaacatctcgcacagatgcgcgaagatggccagcgtcatcacggcgttgggtgcgagatgcaaggcatggatctcatataaatccaaaacctcgtggaagaatccagagaatggcgggatcaaccccgccatagcaaaggacaggaggtgcacagatcactccgggtaccgcggccgcggccgcgactcccccgccatcacggcggcgccttccgacatgatcttgcgggggagactaaggtgcctatccgccgtaatgcgcgatgccggaagcactgcgtcaccagcatcttgagccatgatgaccggcggagaaacggtgaggggcttagcgtgcggggtagcgtggagtggcgagaatgttagggcttagggaacgagtttgcgggtgagcagttggcgaaaggaaggaggcaaagtccccgcctccgtatccttttatccttgcctcgcccgcactcgcctcctcgtttcacgccctcacggttgcccccacgattctcgcgcccgcagttgcctaatcgtttcccgcgaccactcatcacgtcgcccactgaatccacgccccgcattcagtgcgcctgtcagcggcacactcgataaagggcgtgcgacggtcacgggcgcaatctaggcgaaccgtcaccagtaccgccacatgcgtggcgggcgagggagtcgaggtgtggtatagccgaccccctaattttcacgccttaagcatcctcatcatcagcgcggtcagtggcgatcaaaccgctgttgtggttgatacgccgacctggccactcggcaacatccgcttaggttccctgccgggcccgcaaccccagcttgggaagtcgtgaggcaccacgtcagaccgacctcaggaggccaatgtccgatatggtgccgggggctactgtcggagatatgggctcgggggtatgcgaagtgtggggaatctaccttcccatcctgccatgtgtccctacagcctggtcctgcccccgcagtccgcgaaccgcaggagcggccgggggggtcggggcctcggggtgccacgtcatgcccctcgggcccttgcaccgctttgccccgaggccctcgcccagccaccatttggcggggggagcgagcgaggtgagggcccaggctgagcctcctttaatgcgtgcaacgccccaactgccccctgtcacatttaatgtagtgggggcagacgtgcggcgtgctaaactgacgcgccatagtcaagaatgaccggtctgtgaccggcctaacgctggtcacgtctgactggaccgacaaccgtgctcccacgtcgcatctgcttctggcggagtagaggtaggtatgacccgtcccatcggagggtcattcggacggcggccaccacaagtcttcacccattaatgagggaatgacagggctgtcccccgtgtcatgcgagggacggcgctgagccccattcaaggacaagctgtggttcaggttccaggcgaaggcacgggtcgagttccggtcaagatagggtgggaccccacccgaaagaagagtaggtagaggcggtgcatgtggtatccccttgagatataaaaggagaaccttgcccaccgagcaaagggacgattctcaactaacttgggctctaggagaagagtgttctcccgagtttaggaacccttgtaactctcaatctaaatcccaaacacaggagtagggtattacgcttctcagcggcccgaacttgtataatttgattgtgtgcgagctagctaggggccttagggatggatacgtttctagaggcgagtttcttcccccggccgaactcacgaaaggggggtttcacgacctcccgctagagaggatcatccctcgacaatctcccaatcacgatgtggttgtgctgcataggttttaaacttttgaggagatgttttctcattgtttacatatcgcatattaattaataatatagattaatatatatcgcatattaattaataatatagattaatatatgatacaagttaaaattcgactactacaagttcaaaaaaaaaactatagttaacggttaaattcttttctttatgttgttgcaacttgtaaaggttaaatttatcttttatgtttgtgaaataatctactgatctatcacatattaatcctatattgttgatttttttcagttttttcataacaatttaaatgatatttaaataataagtgatgtccctaaagagctccttataatcatttcccgtacatcgggaggaggatttgtacagcgtcaggactcacgacaacggcgtgcagaagcagatcacagttgcagcagtttctactgcctggcagcaggataaactcccagcattaacatcacatctaggcatctatattgataatagtttctttttccagggaatgcgcacaaatatgatgcctggaacagatgtcattcaccaatgtgttacatttagctggttactggtcagagaaacaggagggagggagggagggaacatttggaattttttacatggagagaactccacatggaaaatggaaaaaaagaaaaaaactccatcgagacaatttggagaggacttaaagtgttccttcaagagacaaactatgaagtgctctagatagatcgctagtcctcagtacacattttcctcccagaattttcattcctgtcaagcagcaaaacaaaaatgttctaataagctacagtagtaaagaactaaatcacataggcatgctgtcaacactacagtaaagcctataagcaatagactgagatgtaacactgccaaacatctcgtttgagttttatcttttttctctttgttattttcaaaaccggtgtttcctcactactcaaatatgaccaaagtatttaacagcacatgtgattattctgagaaaacggtagacatctcctaagccaagttttcttaaaaccaggtaatttgattcctttgaaccataaactgtttttaatgtcaattaaaacgtaatactatgaagttcattgaagataatctattccagtgaataccatcatattactatcattaaaagaaaagaaacagttggttgaaaggcatttttaggatactcaccccaaaactttgcatcattttcgtcagtggataacagaacctcatggatctgacagtgctctatgactcccaggctccaaaattgattccatcggatcatccatcctacccacagcaacagatgaaggtataaatagatgttggacagattcaatttcagtagttcaaagtacacctcacctctctcaagtaaaaactgattatcaaccaaatacaccagagtacataggctagaggaaaatacaaaatagaagagagagagagagagagagagagagagaggaagaagaagcaattaatctggcataccctgtaagatgtgctggaaattttggtggccagatcatcagcagtggatatattctttcaatatccccatcctcgggacagatttcgtaaaccttggtcatgttctttgcaacgatgtccaataagaatatagaatcatccagctttagaaatgctgacttcccagcgtttgcgattccgagaatactgacatgggcacacgattctccagcctctgtaacggatgcttgaagtatatcatcccttgcaacagaatgagataatgtccatgtaatttgagacaagttgtgagtccacacttgaagttttgtggggtggagacatacgagagtaaactcatcctcgagcttgccttcgcacagatcaacctcatcacaatcttccaattcaatctcatcagtaatattcactttggtcaactccagagtcttgcaatccaacacaatgatgatgctgaagttagtgaggagaaataattttccaaaagcatgaactcctaatggtatgaccagctcggcctgttcatcaggtcctgggaatgaaatagtgtcggacgcacgaccaacccagatgccatcaaccaaatgaaacagataagctatcatgcacttgcatttgtagcctaaagccagtcggtagtactctctcccattaccaccatcctcaggaagaaattcatggaggttgtaggtgaaagaacgatctagccacactttcagaggggtctgtgggtagacagaaatatcagcaggcggaagaagaggactatgcaccgcaagtttcccatagatttcgacaagcacacgcccatttctggaatcccacatgctcaagggcacatcgctccacgcatcgaagtgtcggctggcgcggccgaggagaacacctagctcaggaggatggccttgcagggctacgaagcgagggcaagagagtaccgaggaatcgatgtagaaccccagcgtcggaggggggtggaggctgcggaagcggcggaggaagaccaggtcggaggcgttgcggagccaggacttgcagacgagggaggcgcggactaggcagtggggcaacgcgacgcggacgaggatctcgcggaggaggtcgtcgttgtcgaagacgctggaggtcgccgtagccgtagccgtagccgccatggccgtcaccgttgctgatagggataaccgcgccatcccctccgatgcagcaccatcacccagctccccgacggccattttctcttgaggggaggggaggagagggagtggaggttgacgagggagagacggggaggaggacgacgacgacgaggagtaggaggagaaaggggaaatttcgataccccgccgccgccgccgcgccgcttgatcaaccaggggaaattttcgtttctccgtgcacagtgacttctggaaacttcgggaatcccgcggagacttctggaagcagcaaatagattctggcctcctgtgtcacttggaaaatttacacgcaggaactaggaagtactagtaggagactactagtcattcccaatgaaatacacaaataaaataacaggatcgctaaccatcattcggcagacaatccacctttttaactcttgagaatttcggacaatccgaatgagaaaacatagaaatagaaaaaaaacatgattttgataggaatataagtgtaaaacagatgattgcaatacacaggaaaaacacatgaatggtcgtttgattggactgcaggaaaaatacaggaattagagaagagataaagactcaaaggaaagtttccaagaggttttacctcatgttagaattcctccaaaacttgcatggcattaggcaatccataggaatttcataggattccataagatccattcctttgattcaaagagctatataggaaaaattcctataggaatgaaatcctctaaaattcctatgaatttcctttgaatcaaatggggccttatcattcgtgttccccttttccttcagctctagtgatctactcgtcttctccaacacttgcgacaccttaaattttggtagagacctacgaattagggtctcgagttagggtcagggtgggtagggggaggtggagtttgttagttttaatgggatggcagaaacagcctagtggtgggtggtgggtcaggcatgcagcgaggtgatggcagcgccaccaaagccatttggtcaaaagcgggcgttgggccagtgagcagtacggaaaaagtaaaaggaccaataaggaggcgaaggccggtggtggtggatccgatagcaccgaagatagggaataaggcgatacgggggtagctcgctgccactggcttgacgaaaagaagaggggagggatggggcatgacgaaaagaagaggggagggatggggcaggggggaggaagcccgttgaccggggagggggctgggggctcaccagagccgttgttgccctccggccaagcggtagcgcggtggggtggtagagacgggggatcgggtgagcgacgacgcactgatggtgtgcaaggggaatggaaggaggagaggagttagggttaagggggtgctacacgaatcctaaaacaaatcgaatggtccaggaaacacaagatatatggtgggattttctacacatgttgatgttgacacaaaatctggtgcaacaaaatgaaggcctaggagatctgcgcggtttctgaaacgctgagcagtactcaagggattgcaactattgaaggaagttgtggccgatgcaattgagattattggtgtccccagccccctttgaaacctcgaccccatcagcctgtgcccctgaccgagccaaagtggtgtccctagccccctttgaaaactcgaccccatcggcctgtgcccctgaccaagccaaagtggtgcagccagaccacgtatttttttcgcccaagcgcacactaacatggcatcgctacagtaaaaaaccatgaggtggcgtgctaatgtggtcctcttttcctccctctctcaagcatatatgtatgacatgtgggtccagaatgtcaggaacgaggtatctcgacggaattgcggctatgtgataatttccagcgttaatgttgcagttttctgaaatgtggtgtaaaggttgcagcaaagtgatagtttagtcaataaaagtgtagttttctaaaatttactctaataataagtagaaataatacgtaagatagctagagaatataagcttatataagttgatgtggtttacgataattattaaatagtatatagaatgatgattcaaatgtaaaagtaagctaatgtggctttatgagaaaaaaaagagagagataatttggataatagattaatcatctaaagacaattatgtgcaatatgttcagcaaaacacaattatgtcccagcgagttcaatattatcctacaaatataataaattatacataaaatcaatttaactgatactcaacacatcgtataaaatgaacaccatatataagagtgctttcccaatttcaattgcacgcacgtttgaatgagtcagtttgcggtacttattaatacaactcaaagctttcacttcagtttaacacttcattccagacacaaacgaagtgttttatttaattgttagctgcaattcacagtaacaatgcatcactgcagtaatttacaaccaccatgttagtttatccccatgacatacgaccagcgctgttaccagctcctcctcccttttttccacttgtcatcttaaccagcagttgttggtgcaaatgtcgccctgaaggatcatcctgcatttgcaataagaaaaaaaaaaactctagtcagaagttgattgcaatttaccagtctattctaatatttgctccagtgtggtgataatgaattattagcgacaaaataataactatggtgcatatctcaccctaagacagctgttgaatgtgccatctttcagctgaggaggaaggcaagtctgcagtgcagcgaaacccctgaattgaagagggaaggaaatggacaaacgacattagtgcttctgaaggagaaatatgaaaacataattcggtgacatttaagcgatagaataaacctaggattctctgacatcctgaggtaacaacggataacgtgtttcagcaacctcttggaaggctgatcaaccattgaggtaaccacggttgctaaagcagctcccacagcatagaaccgatcagcattggcacaaacataagctagaccggcgtcatctacgacaattttttcagtgataaaagttgccacctgcatgcatatttgactgaatcagtttacgagagcaatgggtttaaaaattagcagactaagggaccattttcagaacatcaagtatagtttatggtacctatatttggttttaggtctattttttggggggaaataaccgataattggtgatgacaacctagcgtggccgttggttatatgtgctaatttatggtttgtttggttatatataatccagaaaaagcgagccacttaatttaatgtaaagagtattcatatatattaaaattatatagatacaaatatggtatactgagtgagagtagtgtacttcacatattacatgatcaaaaaatagctaagagtactcaaaagtcagtagatggccactagtttgaagcattcaatcaatgaattgatgcaaaactgcatgatcgaccaggcctaaagcacattttgaattgactagtaaaatgcccaagctttgctatgggcagaagaaaaaaaaatcataatatgtcataccaatatatatatatatatatatatatatatatatatatatatatatatatatatatatatatatatatattttatcaaataccttactattacttctttacttatttacttatgttattcacttgtttggaccaaacgttggactattccataataatacaaaatatcatacggtaatttataaaaactacaaaagcaatagcaaggttagagatgcaagtgggcagtcccgctacccacataaaaacccatttgctagttcatttcccacatggtagtacaaaattttagaagaaaaaaataaactagaagtgacttaagcgggctaaaaaaacccgcttgcccgccccgcttgcattcctaagtggggtgacagattcactgccaccaccactagaggcttttaaaggagtataggtgactctaggtgaaaaaaaattaaacgtgttccttccattttttttgacgggaaagaatactgaagaactaaaggtggtactccctccgtttcacaatgtaagtcattctagcattttccatattcatattgatgttaatgaatctatacatatatatttatctagattcattaacatcaatatgaatgtgggaaatgctagaatgacttacattgtgaaacggaggaagtagtattttaagggggattaatgtgtctggctacatacagtttttgataattcactgccgatcgtcatattatgcaggcatagaggaacaaattcattttccagcagaaaattgataatttttggatcatcaacctgcatgcatgtataacaagtaaaataagcttcactctaaattctggagtggtatactgatgaaacccaaaaaactatagatttcttacatgaatgtgcataagtgtagtaagtggtggtacataagtgtataaagccaagatggtttatagtagttctagtacataagtgcataaatcaataccaccaccagtgttaatgcaatagtatcttttgacatcacagttcagagataacggagcaaaattaggcttgagtctccctcagatctgatctgattatatatgtaattaaggagctaattaaaataaaaatgcttactctttcaagagtttgttttgtgagacatctattaaactttcttaagatacaacctatataatattgagacattcaagtttataattctcagccgagttattgagaattacagtggagtcaggctcagtgagactaatggctggtttctatcaaaaattaataattgtatcgtgtggtgagaaaattgagatcagatctatatatttatcagcagttctgaatgcatactataagagctagatgtgttgtgctataacacagcaattcttataatgtcaaactgatattaaggtctgcagagaggggtctgtttcatgagatgtggccattgttttcaaaaaaaaaaaaagctacttgttcatttattgctaattgttgtgtgtaagttgtttagctctatattacacttgatgagtatttcatactcagccttttgttttattttgttttaggtacaaagtatttgcagcatgcatgggcaggagtagcagccttgatctgtgtactttatcactaattgtaaaaataaaataatttacatcatgttgaggttttccatggttatatatatggaactgtttctaacataattatcatatgatgtgcaagctatgttaaaatcttattttataaattgtcattgtagatgtccttatttaaggacatctacaatgacaatttataaataatatagttgttacccactaactataaagttcaacatgcaagtgtgccacatgatcacccactagtaattattatctatagtatcataaatctcattcaaacatatattatttataattttgctgtattttgagaactcaacatgtaagatatgtcaaaccatcctctccacattattttcatattatttaaacatatacatatatttttttctataatgtataacatgtattcactcagatatcctgtagcatggtgcagggtatcaactagttaccttaacaagagcgccaatgacacccaagctggtcaaccgcaagtactcaaattgtttggccttgtcatcagtttccaaaaatgcacataggtacaacggaatgcgggctgaaaaaaaaacaatatcgaaagataggaaacaacaaaatcactaatagcaaacaaacaaaagactaaagtttgtaccatgaattattttactacaaaacgtagtatatgacacccccaactatcaatattggacattttaaccctttagcagtttttgaatggtttttcatacacatgaacgccacataggatgccacatgtactagaggtccatgtaagcccttatgcattatatgggccctgctcatattggctgcctactcgttgctcgttggcatcatgtgacggtacattgatggagtggcggtggcacgttgaaggagtagcggcttagcgacgagcagccgcggcatggggaaggagaagcagggagtagggagcggggagcaggggcaaacggttgcttcgtgtgcccatggaggcggtggtgaggggaaggagtagcggcgagctgctgcttcactcgctcgctcaggcgacatggcggggaaggagcagcagtgagcgattcttgttgtagtagcctaataggtgggacccccacccctcttcttcctcttctgacatggcatctttgtacaggttggatccttcatcatgtccacgcatatcaaaaccaacctaaatctactttagagggtagtgtttggtattgatagttgtggggcaaggggtgttatagctggttttgtaattaggggtgtgttttagataaagacaagaagggtaaaatagacttatttatcccaaaatatatatggaatcataggtatgatatgtataggtattacttttattttgcgaggtatagtaatattacataataatgagtgacatcattgaggttgggaggaagataattaacaaattaccccatcaacatatttcagtttagacatatccatgatctttaccttgtaagaaatgggtcctagtctccgaatgtgaagcaatacactgcgcaatgcaaataaattaaataaaatatgattatcatagtatttggtagatgagaaaaggtagcaatataagtgtacctgaagaagtgctagtgcattgcaaactcggtttgaagcacctaatgacaaagttgggggtgaaagtgcagggtagactactataatctcctgtttgtttgtcagtaataagaaaaagtgatgagtgtttgttataccacacataaataaaagtaagctcagacatcaacaagttgaattagcacagttattgatatgatcatcaactcaacttgtgctaatgttgaattactaagagtggctgacatcaaaaccacctttttggagaagacctcaacaaaaaaaaagatcacgtaaatagtacaacacaacaaaaattactaattacttgtgggatcaagcatgatcatacctggagcagtgaagcaactatgccaaaagaattccacaacagcagagccaggttttgaaacatctctcttttctgaaaaatagtttcaagaagctgcattattcttaggtttttctttccatgatgctgtaatgtgtcaattgcataatatgcaatttaccattacttattcaattaagaacaattacaaaaataatcaacctggcaaatagaaattaattaatatctcaaggtaagaagatctatcaaccctttgagacctcaaggtgtgctttctcacatagattagtattagaaaggttgaggacaagtttctctgctaatgcgatgtgtactgatccttcgctcactaccaggtgacacccaatgtcagagcaagaaagatttttgagccaggcaaacatcactactactatcatttgctacggaggaaaataaagtgtttttttttctgtttcatatagatgtatgcttttataaatatctaggtcttagcttcattggtaacatgtaacattacttccttatagtcttgctctttaagggaaggcatgaagcttagcacgcttggtgggagatgtgcgtgcacaccctcaacattcaatctctatgtcatgttggaatcaacctatttgcttatttcttctctactagtttgatactgagatcctccttagtatggttcattctcttttggcacttccatgggaaagttcccctttccttatgcttttcttttgtttagtttgtaccttttagaagtatgtatgtaatgcacatgcctttttatcatagatagctttgtctttatgtaagaacaagggactttgcaatgtgaataaagtctgttccaataagattttggatgtattttggtttactttacataattgtctatactgcagttaagtctattctacgtagatcttctgagttgtgtacactttttctcaacctagcatcttttacacgtgcaaatgccaaaacccaagaaaaacaacttttggtcggttttccaaaagccattccacctctgcatgtatgtagaagctactagagtaattcccaactcctacccctctccctgttttatttatagcggccagtggaaacatgaatcatgtgaacttcgaacactcaccctcctcctccctccaccctccccccctctcccacacactcctcctgttcccttaggcaatttattgtctcaaccacaattcttgtagttagaatgcctgacactatgtagtagtctaataatctttatgaaaaatatccaaacctagcaaaggggccttactattgtattggttaggttaattggcatttgcagtaatattgtcacatcaatgcatgccatgtcacatattgtccaaaaatttacttaaatattgcatattatcgacaaattttattttattttatacatatttatttaaaaattgagggagaaactaatagttatatatgttggagaatatatctcatatagcatcattagataattcctttcatgcacaaatctgcaataataaataatgaaatgcaaaaaggtgcatcatctcttttcaactgtcatttattcatatcacttgtatttggtggaaaacaactcattagtattttagtaaatcaagttttacgcaacttggagcccataccacttcttcaaataaaaggaatgatgtaatagacaattcccagaaaagatataaattaccttgcgtagctcggaaggagcatgtcgtttgagttctggatctagcaaatcaagaataagacgctcaacaagttcagggtctctagggctaggaacctcactagtcaacatagcaaatatgtgtagactagctatatccaatgaaagaagtgatataaaactctaagtcaaacaatccccaatgcttctacaggaataaaatagaaatatgtgatacataggggcactacagcctttaagtagtgtagatacagatgatgtgcatttacttgtgtcataagaaatcagtagaaactgttccagataaatgcacattatcttgttggtttctttataatctttgatgcatgttactttttctctaaaaagaatccaaagttaaaaactgcagctccacatctgcgatgagtcatgcaaaagataagtattagcggttcataccttttttatgtcattcctatcgtgtgaagcacatgacaaagtgtaagttcggttcctttatttttgttaatatatgaccagatcactaatctttcttcagagtgagacaaaactcacaggaaaataatgattcacattagaaattttcccatgagttatccatcagaatgaaactctcaaggtggtggttgggtgtgggctggctggggattcaagagaggaaagatgttttttttggaaaggaaagaggttagggcatgttcggattataggataggaaaagtgtacaaatttaggaaatgaatctaagtgtaaaacagagtaatgaaaaataaaggaatacaaaagttaataacaagtttcaatcaatctggtgcatcggcccatattcaaagatcatataattgtttaattgatatcttataataatcaatcttgtacttataatatctctatttggtccgatctattaacattggttttaataaagttagaagattctttgctgatgtattctttgctttatttttcaaaattatatcacatccaaatcttcgctgatgtattctttgctttatttttcataacttatatccatctgttatagccgatcgatccgaaattccaacatcagctaggcacatgattatatatcggccttttggccaatctgccaaacgatctaatctttatctatatcttgttagatcaaactaactgacatacctaaaccctaattgataggacatgtactagatgtaagcaaatctctcaggcctctacaatgaattttgcgtcaacaaatttgtgtatgaatacaaaccgtttgaggaactgaaaattctgatgaaaaatacattgtctagaagcttccccaaacataaccttatactccctctatcccctaatataagggaatttgatattttgcttgcaatgtttgaccactcgtcttattaaaaaaattgtgaaaatataaaaaacgaaaagttgtgcttaaagtactagtatactaaagtaagtcacaaataaaataaataataatttcaaaactttttgaataagaccatggtcaaacagtttaagcaaaatatggaaatcccttatattaggggacggagggagtattacagttaatgcgcaacgctaatgccaatgctgacaccgaagcgctcatgtcgatcaccaacgcatatggctgcacaccgaagcccgtcgcctcgccgccggtgcagccgccgcccagtcatcggcgtgcatgaacaagctagctttggtcgaaaaccagcggtgtcaaattgatcaattaagcacgaacgctcaatgatcgatcgattgctcgattttggacggactgccctaatttaatcctgctaatgaaattatttgatcccgttcatataatctgtagttaatctccagatcgatcagtcattttacttcttccgtgcagtcaaatcctatgggggtattggtaataattgtaactctcgaaccctatgggagtagagatggaattgaatttggtgatcattaaagttgatggagcaattgttgcatgtatgcttgtcggttaaacttttcattcctcattcctcttccgacgggagcttttgacgcgtgcatacgacaggaaggatgggggcgtcgggccgccgctcctgagagcaaggctaataatatagccgacttgttggctataaggtttttttagccttctttcaacctacccatataatagttagctctttacaattaatatagggttcacttgtctctctcatatagttttttggttcttgtgtccaagccggctgtaagtttatagcccgcttctcctctctctcctctcttctctcctccaccttagcatttagccggcttatagcctactgctatacttgctctgaggcgtgccgcgtgcgggacagaaggcggcgccccggcggctcttccagatatacgagtagttacttcaaacgagtcattgagggatctgtttttccggattacccctccgtctcaaaatataatagattttgggtaaataggatgcatcatattatgaatctaaacatacacgcagctcgctgtccagatttatattactagaatacgtcacatccatccaaaattacttatattttaggatgagggaaatatcttttcaattactagcaaaagtgcccgtgcgttgccacaggaattgtaaaaaccagaaaattgagaaaaactcgagaaagatttatattatgtaattaattgaaatataaatttccggaaatgtttggtattttttaagtaggtagatatataattaaattagttatataaaattatatagttggatttaattttattgaattatccatgattaattacactatttggaattttattgaaatttctagagtttaatagctaattttgataatacaagcattattttagtatttatttaaataaaaaatcatcctttctctttaggccattttcagctcgctttcatcccttctcctcccctccgtctcaacctgtaggaaagcattcggcctaacaggaagtctaattcggctccccctactcctctcattgccgtgtggcccccaaccaaaagtccaacctaagtgctttgttggaccggccggccagcacgctgcgtagcagtgatgcggcccaaagatggaggctagcccaacacgggatcgatctgagccgttcgtttcgatggatggctcagatcgattttgaatccatcaaaatcgtcggggttaaaaaatccctaaccctaattcatttttccctccctcccctcaccgcaggccgcccctgtcccccaccagcggcgccgctcctctctccgcaccaacgacgctcctcctcccaccgcgagttgccccttccccaccggtggcgcctctccacgcccctcccccaccggcagtgcctctccatgccctcccttctcccgcggtatcgctcccccttcctcccccctatccttcggctcctttaattcctcctcatcggggtgccgctgccatcccgctcctcgccacatccagcaagttggcggcaccccgacggcatggtggctcaggattggctcctccctctccctcccggcatcttcctagcgcaaaggcgagtcagcgacttcccaacgcaaccgcggctactccccagctccctggcggcacagtggcggcttggctgatccccgatgcaatgatgggacggtggaggaggaggtccgtcgaggaggaacggtggcctcccgctcgcccctccatctcctctcatcatctcttgatgttttggatgattttgtgatgattctgatttggatttggatttggatttggattgagattttgtttttggttggacttggattttgattatgtggattttgattctaatagtataaccaattactagctcaaaatcatctatagtcaatctaatagccaattcatacaatagttaagtacaaatacatactacatcattaataattggtcacacatgtcatacacgcagcatcttgtagtctgtgctacagcctatagatggctacaagtttatagctagcccgttacttttttctctcattttttatctccttcatactccctccattccattctaaaatataaggtataaccactcctaacccaaagaccaagaaaataattattaccatcttgtactttggatcataataaaaatataatatatgcatccaatagaattagaaaacatgagagtgggggatttaaaaaagtaataatttaatggagaaggggtcatagttaatagcttacatacacgcatatcttatattatggaacatctaaaaaaagtggctgtgtcttatattatggaatgggaagtatatgtttatagctgatatatagtctgttattgtacatggtctgtaggaaaaaaagtacccatacaaattcctaaaagtgcctcatattaaatacagtaccaagtactgtaaatgaacaactaatggcgagggtgtgaccgtgaacagatatctcgctatagactatatagatatctcgctatagactttatatagaaaggcaatatctagctaaccaattaaagaggaacatttatgaactagaactgcaagattaacacctagggaattgcttgtgagccggattcattagcaagctaagatatggtcaccggattacccattcgggtagtaagccgtcacctggtgaaggcgtcggatgctaccatccagccgcacgtgctcactctctcccacatcgacctccacgccgacgacgtccagaccaccgtcacctgcgtctaccccaaccctgccccctccggcgccggcgatttcgccgccgtcgtcgccaccttcacggccaacctgccgtccttcctcagccacctcttcttcctcaccagccgcatccccaccaacccggcgtccggcccgttagcctttccggctccaaaaggaaaaagtccaatttcactcccttaaatgtcggtcgaatctaatccatgaccctgaaccgtaaaaccggataggacgactccccggactattaaaaccggtgcaatttgactccctcaacggttttggagggcggtttcgttgatgtagcgcatacgtggtggtattgacttggtattccttccacatggcgctgacatggcggttaggtggcactcgaattttaaaaatgtgtaggacccatctgtcattcaaaaaaaattataggacccactggcatgtggggcccacgtgtcatcctctctcttccctccatcctcatccctctctcccttctctctctctctctcctcacgtcggcgtcatggagcctcgactccctgtcgtgggtgtctccacctcgccaccgtcggtgccccggcgtcgtccaccaccgaagacgccgtcttcatccgcccaagccgtcgtcgtcaccacccgagcccagctcgagctcgtcgccgaaccgccgccacgatgcatagccaagtcgtctgcgagggcgccgcctacgaggccgacaccgtcggcgccttcggcaagctctagggcaagcccgccgtcttccgccacgaccgcatgcccatgtggccatgttcgggagaggccgcatcatggccgaaggcgacgagtgggctcgccaccgctgcatcatcgcccctgccttctccgccaccaacctcaacgtaatcaaccaattaattcattctctccatgcacaagaacacgtgcactattctacatgattctaattgatggctacatatgtgcctgttgttgatgatgcaggacacgatcggcgtgatggaggagacgacgtcgaagatgctcggcgagtggagcgacatggtggcgttgggacacagctgcatcgacatcgagaagggcgttgtccggaacgccgccgagatcatcgccaaggccaacttcagcatcgccgccgccgacgccacggtcttccacaaagctgcaggcgatgctgttccactccacgcgcgcgtctcgtcggcgtcccgctcgccagcctcctccatatccgcgccacctacgaggcgtggaaggtgggccgcaagatcgacgcgctcctgctcgacattatcgactcgcggcggcggcgtgaaggcggcggcatgaaggaggtggaggaggtgaccggttggtcgggccccatggacgcggcggtgatggaaaagctcaccaagatggggtgcatgctaaacgaggtgctccggctgtatccgccttcgccgaacgtgcagaggccagcggcgtgcgatgcggaggttgtgcgcggggagaggcgaaatgcggcatggggattagggatttcggcgagccaaggaagggaaggggaatcggccgacacaccctccgctgccgctccggccctcacccgctcgccgcccaccgccgccacggccgaaggggaaaagaaaagagagagataagggagagagaaagaggaggaagaagaattggagagagatgatgacacgtgggctctacatatattttttaattccaatgccacataagcgccacgtgagactaagaccaggtcaacgtcaccacatcagcgccacatcagcaaaaccaccctccaaaaccgctgagggagtctaattgcactggttttaatagttcggggagtcatcttatctggttttctggttaaggttttctggttaagggttacagattagattcagcctactttttaagggagtcaaagtggactttttcagctccaaaaccatcaaaaggtaacagtttcttcattccaggccatacagagcacggcccacaagtactgtacatttttctttcagtaaattgttacatggtagatggcaggtagatggattaacaaatcatccaaaaaaatatatagctccggcctagttgattgcatgaaaaaattggcgttgagataccatggccttaattacttggatttaaacttgagtacctagaatcgtttacatagaatgaggtaacctcccaggtactcgtgttcaagggtacagttggcattttccagttccagcacatactgtacattcctcaacattacctgcaacgtgtctcaggcagtacttgatgcgatcattcataacatcctgaaaaacatgtttgcatgcgattagtaaatatgataaaaaaaagaaaacaaatcctgctcagtttgctagacattagctaatagctattgaaaccaaagttagcttgcttgaaatcataagttacatttatgattatgcaagaatttcctgtaaatttcttaaatagaatctttcatctgaacaccccctaatatttatgaaaagaaggcgataaggtaattttggactcattttcatacgatagcatcctcttcaacaccatctaaaagtgatgacaattgagaggataatcaaatggatagcactgagacacctgtactgaatctatttattgaggcaaaatcacactactttctctttatattcagtgaatatagagttttctattaatcgatacagactgcacaacgctttttcaaacagtgtaaggagcacaatcaatcaattgtcagaaaagtagtaaacattatttttagacagcttctataaagagtgcacaatgtaacagtgacacaaataatctagaagaatttatagggaaatcaatgagcacataccaccataagctcatgcaatccaagaggggcagtgacaacataagttatgtttgagtgctccttagatgcttccgcagctaaagcagggatatcctgggtgaaaaatatagtgccaacttgaatgaaatttttcatcttaattgtggagaataatacataaggcaaatacccatctacctaggaaatcattgcaataaatagaaataacctgatgaacttaacacccttaggattgagtactaacaatcttaaataattcaaaggcatacttgtttccagtgtcgtccaggtgaaagaaaatatggactgacaataacacgggacgctccttgttgcacacattttccaaatgcatctttaatagtaggctcagctagctcctgcacacattcatctactataagagtgtaatggaaggtaaagtgacaaaatacacagaccatagagataagaaaatatatttaataataattcattgccccagaagaactagccatacagattaacattacaaaaaagaaggcaattggaagttgaggagtagatagagacacatttgacaatatatacctttcatgaaacaaattaaaaaagcgctcaagttacacttacacctaattatgtgtagtgactatagcacccttgtccatgcaacactgaaagataatgtgcattccattttataatattaacatgctatgcgggggagacaggaccagtgtcgtgcaagtatccatacagattgcttttagaggttagagataagtttagaaacaaattttggttgtcggctctgttcagtcgagctatataaagtcagggtgtcagattggtttcctttaagcagaaacaaggtctctattttcccatctcctgctgtacccatttatttccttcctctggttaaggctccctggcgcaggggacctaacacaacagaagcatgataatactatcgcactaacatgtgtcatgactcacatgtcccttaagtcgcccttgacaatcaaatcacttcacgatttatttatgcgattccttcttggcagcatggatccaccaaatggataaatgtggaggcttgcatctatggtttgagtatactataattttatgatgtggcttccctccctctatcaccaggtgtacaatccaaagatcagaataagattgaagtatatggtttttatgttactctacccagaatgctagctaagtgtctgcaataaattgatatcgaaggggatcaaaacaaacacatgcatttaaacaattaaactgaactaaacctaatctacaaatcagccaatcgaacatggagactacagattaataatcacaaagacagcagagggcttgcactgctttgaaatttgtttcactttgcatagaaaaccgaatatgctacatttaatactaagtcacaatcaagcttcatggtttcttattttggactacaagaatatttttcacagaaaaaaaaagcattaaaagaagaggaagtaataaaaaaaggattatctcctatactactgttgctcagctgttatggtcctctacttacagataaaaaaaaaacatattgaggaaaaataattcattttataggtaaagggaatatgtcttttcaatcctttcccatgctaggttttgaccaataaattggccatggctggtactatttccaaagctaagacaaggccatttagtaaagtctaatggcaagatggcaacatcaatgatggcacaatccaacaggaggggacattgcacaagtaatcttggagttacagaaaataaaacaccctatacgattgtacccagctggcgagaagttttgcaatacagacacaaaaggagaatcctatagctactcatattggcatgtgaatgaaaacgtctaatggtatatacaactttgaggtttcatggttaaatacacataaactgtgacgaacaggtagtaacatagccattgaacaaaactggcagatattggaagctatcagaaaactgttacttaataaacatgctcagtggtcagccagaatttctgatttcaaaaaaactataggtcattcagaaacaaactcgaaaattaattaattgatttgtagtattcagtcaaaaaattgtgatacgccacaagactcctactgatgggagtaaagtcggtttgattctccaaagagattctctctaacaagactacataagttgtacttaataaattcaaaatcttcacaaaatacattcgcacataaaagcatgagcaacgaatagtaccatatgagcaggctcaacgatcttgtaaccggtcctcgccctgaacatggcaacaaaatcatctgcaattatacagagcaataaacaaaaaagcttgaaggcgccatgaaaagaattacagtcattcaattacttagcatgagattggattcttcacgccgtgacccatggtcaacaatgatcacaccatccttctcaccaacggtgcaactctctccttgggccgtttctgagctgaaaccagaattcggcttggcactcatgactatgtttccaatgttgagtccaattctcggcaacttgacaaagctagcagaattcctgacatcaatgctcctaattccaacaaacaagaggttgtgtgttacggcaagaactagcagaagttaactagcatgaaagaaaaagaatgcatgtcatggagacaaagtcttacttaccatgatgtcagtttgtttgtatgggtcgcacttaagggttggaaggggattgagatagtatgcatagaccaccctccaaaggcccaggagcaccactatgtgattcttgttgaaaataggtgatgacagggcagtggcggatgccgaattccacagctgagtatttggagttatgagatgttaattcattgtatggaacgcatagtgttcgctataacagtagcacacatgacgatacaaatagtagcaacctacaacctcttcgtttttttaaaaaacaaagttgtacagtatccatcaccaatcaagaatgattaccactaatggcagaagcaagttaccacaagagcaaggggggacaggacattttcagaatttcaggcgacttcacctatggattggacggtgggggatggatggattcgttgccttgattcactcaccgcctctggagcacaggggtgagtagcctctctcgctctcaaaagctgcggcgcgccccggtttgctcctcccgcgcgctctgagccgtggttggccgtcaaccccaccgcgtccgccgtccgccgccgggggaacgggagaggagtggttgggaggggagacctcgttaggggatgggcgctggatttgttttgccgcagcagccaatggcgagagaatgacgacgttgtccaaccgagtttcagcgaggagggggtcgcgagccgccgactcaggctcgcctcgcgctcgcacggtcgccgccgctgccttctttcgatggggaaaaacgcgaacagtagggagatagggttaccacttctggggtgaaatttgtatattcgtcgccgtttcggtagaatgccaccatcataataggattcaattaaatgccactctcaagccctcgactattcactgcaataccattttacttttttatttggctattcactgcaataccattttacttttttatttggatttctaaattgttttttcctcaatttatttttttcttggacttctatgcccctggctcagtaggttgaaccggagaggaggggtggcgacttgggacctcgccggtggagtaagagaggcgctgccgccttcaccaacttggccgcaccgcctctcccaccgagctgcctctccactcctcgttgtgtcgcgctgcctcttgtggccagtcgagccgcgcgcctttctcgtccttggcgccaccgccgcaaggacggcagtgtacggcatcctcgcccccgtcaaccgggagatgagcgcgtcggtgggctaggagggtgcgccgccacaagatttctccgagggcgcagccagcgcggttagggaaggcggcggagaacgaggtgagcggtgccggcgctgttggggaagacggccgcgcggatggcgagggaggcagcgcgggtgtgcctcggttggggaaggtggtgccgcaggcgtggctgcccctccctttggtcttctctcctctccctcggctagcgcagcggaacagcaacagaacaatggtggtgggcggcgccggtgtctccacctcttctccgctcgcgctcacgcttgcgtgctcgattcaaccaaatgagagagaccaagaagaaaccaagtccgattcaaccagttgacccatgggcataaacgtacaacaaaaattgtaattgaggaaaattaatttcgaaatgtaaaaaaccacgaaagtggcattgcagcgaatgcgcgcagcttgagagtggcgtttgatcaaatcccattttgacggtggcattctaactaagctagtttttatgggtggcagatatgcaaatttctcactcctgggaggggcgtgcacctcacgtgcgcgaggaggagcaaagtgcattcgatctgtccagttatttttcaatgatctggtcaacccaaatacgagtggaatattcgcttttaaaaccaacccaacctgcttagtcttgaaaccaaataactttaaaaatgggatggcctcaacctggacctagttgttaacatcaaattttggtaagccccaaagtcatcatcggtttagaatcactattggcttcagcatcttggaattggccgatgagaattatcaagtcgccaatagtcgcattcttagtagattcggttaaggaaattaatctattaaaggaagtttatccagaagtgaccgagttcaaggaggatgcggcatggtagtttatctattaattaggaagagttttttattttctttttatctttaggaaagtgtgcttagtgtccgataagaactttatgtttttattttatatttaggaaagtttctttcttgtccaataaggactagtatctacccatggatataaatatgtacacctagggtaattataaactacctctcgatcaatagaactactatcggtgcatcaccaccctcttttccgaggtttttacttatcaccggtggaacttggcacctgatgcgggactgcatcggctttcgatcttcggcgaaggggtaagtcctatgttttaccgaccctggtaattgtatcggctacattggtgtggttcaaggctgcatcgcttcgacctctcaaatcactctggttcggttgatatatttgtctgcctatttatcatatatataagttaatctagtttggtagatttacttgtatcggctgggatctgctttagagtttttgccggtatcagctaaattgctttgccagattagattagctaaggtatccacctctcttaaagtcagtaaaaggcttgattgtttagactttatgtttctttgcatacttcgagtttcatcgaccttaatcgtgcttggaactataaaaactaacctgcctttgattgccaataagggtttcatcggggtttcaaccgatgagttatctggatgttgcatcgtcttctaaggattacacaagttggattcagccaatcgcaataaaggtttcattgtttaactaatcatttggatttaatgacatcggacttccaaccgatgtatgctttaaccatcggatcacttattctatcatattatttttagacgattggtttctattgaattatattattgttatattacattatcattagccgactgtgtttatatctttatttactcaagtatcaaaatatacgggatatatagccgacagttcaagactctattgacatcagttggtatcggcatcggctggaactactccatcggcttgtcagccgatcagctctttggtgatcaacatatttgtctattttgtcaattgcaagatcaaactgataggcacgccagcatctcatcaatattttggatatgcactggagctaagcggatctcctaggccattgtgttcgtcgacttagttcgcgctaacacagatctggcaccatcgggcgagcgtggatttttcgtcaatactagcaaaaccctccaaccaacaagtttaggctctctttgtttaggcttataagttactccttccatttcatattataagtcgttttaattttttttttcagtcaagcttcttcaggtttgagcaagtttataagaaaatttagaaacatctaccacatctgattagttttattaaatataatattgaatatattttgataatttaacactctttaaaatgtgttttgattatttgacatcctggcctactttcattcactcagatggtcccacgtatcatcctcacaagtgtcaattagagcaattgggcaataaaaaaaatgttaaattatcaaatatatttcataagagagatgaaagagagggaggggagacagaggataagaaaagagtggaggaagttaaaacgtggaggtggaggagtttggattatattctatgggtggatttttagtccactaacaatagtaggaggctagacatcttttaaaccgagactaaaaataatttttacaccaaccgggactaaaaattataaaatagcgttggacttttcaactgggcctggcgttggacttttagtctcgattcccattcaaaccaagactaacatggtttttgcaccatccatcaaaagatcacttctccgattaatggtcatggattgacgtggatgaaagagagggccaacaatggtgaaagcgtagactccaacgctgcatcagcatcacggaggaaggcagcagcgcggcgcaattagcgcgtgatcgcatgattagtgcgtgccgtaccgtgtaaaaatactcgaagcattcgtcactactgatcagcggcgaatcctttagcagattcttttcttgtagcctgccttttgttttgttatttccttcctgttttgctcagtctcaagctgcatataatgctctcatgcatagtgatataatcagaagcactcctttcactcacccgagccaaccatggcgaggcaaaccaacggcggcggcagcaacaagaaaccttctactgctgccggcggcgatgcctcaccggacaagcaaaatgcgccgcctcccgaggacaagaagccgccgccggacggcactgcaccgtcgcccaccacccctgccaccggcaataataatccataaggatcctccgccgccgccgccgccgcgacagccggcggcggcgaagggcacgctggacgccttcggccgcgacctcaccgcggaggcggcgaacgccgaccccgtggtggggcgcgaggaggagatcgaccgcgtggtctgcatcctctcccgcaagtccaagaacagcgccgtgctcgtcggcgccgcgggcgtcgggaagacggcgatcgccgagggcctcgcgcagcgcatcgcccgtggcgaggtgtccggcgtcctggagggggcgcgcgtggtggagctcaacgtcgcggcgatgatctccggcacctcgtaccgcggcacgttcgaggagcgcatgacgggggtgatcgccgaggcggaggcggaggccgacgcggccgccgggaaggtggtgctgttcgtggacgagatccacatgctcctcggcgccggccgcgtctcgggcggctgcatcgacgcctccaacatgctgaagccggcgctggcgaggggccgcgtccggtgcctcggcgccaccacgcacgacgagtaccatcggtacatggtgagggacgccgcgttcgagcgccggttccagaaggtgcacgtcgcggagcccagcgtggacgacaccgtcgccatcctccgccggctcaagccctcgtaccaggaccaccacgcgtggatatccaggacgccgccctcgtcgccgccgccaagctctccggtcgctacatcccaggtgagagaccattgcgtcgcgcttgatcaccaatcaactctgctcacgatgtgtgcttctcagcgaggcacttcccggacaaggcgatcgacctggtcgacgaggcgtgcgcgacggcgaggctgctgatggatcgccggaagaagaagcaggcgcaggcggcggtggcgcccaaggacgaaaacgtcggccccgaccacatcgcacaggtacgacgcacgccggcgcgcgccaccgcatcgacgtcgcgcgccggcgagacactgaccgcggttgatgcgcatgcgtacgtgcaagtggacgggcatcccggtggcgagcctgggggaggacgagaggaagaagctgctcgagctgccgcagctgctgcaccgtcgcgtgatcgggcaggacgaggcggttggcgccgtcgccgaggcggtggtgcggtcgcggtcgggactcggcaacccgaaccagccgtcgggctccttcctcttcctcggcccgaccggcgtcagcaagacggagctcgccaaggccctcgccgagcagctgttcggcaacgccaagctgctcgtccgcatcgacatgtccgagtacgtcaacgccagctccgtcactcgcctcatcggctccgctccagggtatgtctcgtccgttgcatccgtcagtgccattgctgtgagcttgcatgcccaaggctctaatggcggccgccgtgtgtgatcgcgtcgcatgcgtgcaggacgaacgggtacgacaagggcgggcagctgaccgagctggtgcggtgtcggccatacagcgtggtgctgttcgacgaggtggagaaggcggacgccgccgtgttcaacgtcttcctccagatcctcgacgatgggcggctcaccgacgggcagggccgcaccgtcgacttcaccaacaccatcatcatcatgacctccaacctcggcgcgcagcacctcgccgacgccgccgccgccgacgccagccacaaggacgacgccacggaggccgccgccgccgccgccaagcagcgcgtcctcgccgacgtgcagaggcacttccggccggagctcatcagccggctgacggagatggtggtgttccggccgctgtccggcgagcagctgcggaaggtggcgaggctgcagctccgtggcatggccgcgcgcctcgccgagaagggcatcggcctcgacgtcgccaacgcggcgctcgacgtcgtgctggcgcggtcgagcgaccaggtgcgggcgtacggggcgcggccgatcaagcggtgcctggagaaggacgtgatgacgaggatctccaagatggtggtgcaggaggaggcggacgacgactgctacgtcaccgtcgaggcagaccaggggaaggaggagctcgtgttcaccgtcgacaagcaggcagacgcagaagagaacgacgcggcggcggcgtcgtcttcgtcgtcggcggcggggaagaagaggaagcggaggccgccggcgaggtatctcgtcgtgattgacgacgacgaatagtgaatccaatcctgatcgtactgatcgttgggctatgatttctcacaatttggaactgtgcctcaaaattcagatttctgaattctgatcaatcctcaatgttcttttattaccggttgttaaaattccttgcacatccattcatctggtcattcccgcaaaaatattggccattgtcacgaggtgatgcaagtcttgaactcctggtcccatattgtctaagagcatctccagcagaggtcctaaacacgggggtttctcttccgcacatacgcgctaggaaccggagacggcgcgcactttcctaccgctaacagcgcttagagctctctttttttttcctaactgtgtcgttcttttttttaataaaaactagctgggtggcccgcgcaattgcgcggctaacacccaaacaaaatcatatctatttcagtatgattttacttaagatttattaaatagctatccccgtatttctatttatatagtttttaaaagtcacaccagttactaccccttacttctgtcatatgcttctttatttgcttgctcggtctaccacggcatatggaacctctcaactgctccctcgggataggtaggcccatcccccacccccctttcccgagaggcggccggccgcggactgggatcgctcgttccgtgcttgacttacgagctcgtgtagtaaggcctccgccctatctatatctatggatactgaagtgtggccagctaataacattgattcaattggcattgacataataagaataccactatttctattcattctctttgaaacatttaaaatttggatcttatagttttttgagtttattatctcgttgggtttctttttataatttctagaagtcccgtcaaatgctgccattatactcctctacgacccgtccactgtcttttctttttattatcattgggattttataaatcgaacataattatcgtttgggttcattttttactttttataagtcccgccaaaccgtcagcggctttgccattgtactcctttatggcttgcccgctgcctcccttctttattatcattgagattttaaaatcgaacatgattatcattggttttttactttttagaagttccgaacctttaaaggttggaccttgtagtttttagagtgaccttgtagtttttagagtttattgtctcgttgggtttcattttttataatttttagaagtcccgtcaaacgatgccactatacttctctacagcccatctaccgcctatttttcattgtcattgggattctaaaaatcgaacataacaatcattggaattcattttttattttctagaagtcccaccaaccgtcggcggctctgcaactgtactcctatacacgtcgcacgctgtttctcatttttattgtcattaaaattttaaaaatcgaatatgattatcaatggggtttatttttttttactttcagaagtcctggcaactgctttacccatttgcttcacgatctgcctaccgtcccttcttttaatcatcattaggattcgatttggtgctttactaacagtttttatatgtcgtatcaacctccgccactctactcttttataggcatgttacttaatttatctcgtcatggattttagatggtctttttttcaatagtctttatttttatcatcattttttgttatttataaattttattcctaattgaagtattttttttcttttttaatttcagaatttattttttttcaaattttaattaataccgtatagtgttcttttaatatttttattttttattttttgaagtccagttgtttcaaaattgtattcctatttgaaatctcttttagtttttccaattttggatattattttattttttattatgaattttaattaatgtcgtattgggttcttatatattgggttcttatatggactttcaatattgcttattttaaatcccgaatttcagttgattttaaattatattcctacttgaactcttcgtttctttttgctaatttcagatcttatttttatttttattccgaatattaactaatctcatattgggttcttatatggactcttctctcaatattccttatttttaattacaaatttcggtaatttttaaattatattactacttggactctccttttattttctaatttcggattttattttatttttattttgaatttcgattaatcccgtattgggttcttacatggacacttcttttaatattgcttatttttaattccgaatttcagctatttttgaagtgtatttctacttggactctccttttctttttcaccaattaatataggaatttctagcccccacagcgaacgtggtgcctcctttcaaagctgttttaataatataatacatagatagatagatttgccaccatctgttttttattttgtttagttgactgaaacaaactttcaactcagatttatttcagatttggaaacttttcaactaagatttgaaaactctcaagtctagatttgaacacagatttaaaaattttcaagtcaagatttgaatacattgaacttaaatttaaaaattttaaacttagattttaaaactttcaaatatgatttgaaaattttcaagtcagatttgaaaactttcaactcgactcgaatttaaaaacattcaactaaatatttgaaaactttcagctcatatttaaaaactttcatctcagattcaaaaacattcaactcaaatttgaaaactttcattcaaaacttaaaaactttcatctcaaatcttaaaaactttcaactatttaagtcaagatttgaaaactttcaactcagatttaaaaactttcatctcagattaaaaaacgttcaactcaaatttaaaaactttcatctcaacactgaaaaactttcaacccaaatcttaaaaaaattcatttcaaatttaaaactagcagaaattaaagatgaaagattcaatttctaaataaaaaaaccacggaaaaaggtcggcaaaaaaaaagtttcagcgcctccttggctcccggcggcggaaaaaagaagcgagaaaaaaaaagaggaagagagtggttgctcgaggacatgggccgtgtgggccagaaacacgcgccggttaaactaatagcgcgtacgcgctaattagccattgcgcctaaacacagcccctaaacaatttttgagagttgagaaaaaaaaatcaggtccaacagaacccctactaaaggccctaaaataggaaggcctccaaattatctcctcaagcccctaggcctcgggactttctcgctggcccctattccacgcgcaggagagatctcccaccgccgcgcgctgatctctttttcgcgcgaaaaattttgctagcgccgccgctaaagcctctcctccgcatgcgcgccgcctggatcagcgccctcctctccggctagccacctcctttctcgccgcattcttccctggctggcgacttcctcccctgccggccacctccccacccggtggcctcctccctggcgccctcctgaactactggccacctccctgcagggcagcctcctccctggcggctggcgccctccctctcggctgccagcccgcccgacgccctcctccccagtaaaccacctccacgtccggcacccttctcctcggccggcaatagtcgatggtagtttttttttctttttgcaatggatttgtcgatgcaattagataaggcttgttctttgtggagatttagcttgtcggggagataaattggatgtatgtatttagaaatatttggttggagccaattttttggtctttccaaagataagcatgtgaacatttctattcagttcagatattagtagggaaattatataagataggtggttaattgtgcccgaactgatcgtgtgaatgaattggtgagaaagaatctggtggtgggcactttgttgtattttagtgatcataataaaaatcgataatatcacaactcagcagagaatcagtactataactgaaattggcaggggtgatgcttggatcgagctaatatggttttgggcaaagctcctcccctttctattactgaaaaaaatggatagttcttgatgtagatgtactctgtaaatgaatagttcttgatgtactctgtaaattttggctgcgaatcgatgcttttatcactcttttatcgctactaaaattttacatttccatgtatcggctgcttgcagaatgacaagatgaaacccatgacagtgccatactaattgatatcatctgcattgtcaaactttttaacttttttagcatggtgtaactgcctatttgtgtgcattgaaatctctagactacttacattgcaccttttctgcaacagtgcatatgcatgactttaagatactgtgtcagctgaaatcttgtgatcgtattctagaggatatgggtgtattgctgtttaatttcctgagctacacaattttatttgtaccgatgttagttatatgcaggttcttcgagcagactgttacaaaaagtaaaaaaataagctgctttggggtgctatatggttttctttttaatgcaactttgtagagctctagcataacctgttctaaattctaatgattggaaaattttgctaccattatgcattctaccaacatatattagctagtatctaccatttttcctaagattgattggagaagttgtcaatttatctacttattgcagtgactagattgtgatggcaagtgaaagtgattcctttgtgcgcatgatgtctgaagagacccatgttgaagcatattccttgccaatgcaaaatgaagaccttcatacttcaacaaatggtgcaaaaggaagagccaaaagatcaagcaactttaatcgtacggaggacgttcaactgtgcatttcatggcaaagcattagctcggattctattattggcaatgagcaaccaaggaaggcatattggcaaaggattgcagagcactaccatgctaaccgtgattttgagtctgataggaatgcaaactctcttgagcaccgttggggtaacattcagaaggaagtaagaaagtttcagggctgctacgatcaaattgagcgtcgacatccaagtggcataccacatcaggagcttgtaagttaaattgtttattcatttttattaataacaatcttgtatgtatgtcaactaacacttgaattttgctacaggttcttgaagtcgaggcattgtactcatcgaatgcaccaaagaatagggcatttcagtttaatcattgttggctcaagttgaggaattctccgaagtttcaaactctagaatcccacaagaggccaaggtctaggaagtcttcgaccccaattgagatagctggtgaagaagatgaagaaggagatgatgctaggaagagtacaactcctgatttatcacagccaagtgctaaaaagagaccaatcggtaggaagcaagcaaaggagaagttgaagaatggaggagaagatggaccatacaaagaggcgatgaaagtgttagagtttgtgtcgaatatgtgtacgtagtcggttacagtttaggacttggagttgtactaggtgtaggactagagtatgagtcgaactctgtcctaggatctctcataaatagaggggcgtgcctgttgtaaccgcatggcgacttagcatagcgagagggagcggcagccggcggcgaccggccgtgagtcgttgtaactctgatacgctgtaatatgccggatcggggaggagcgcccgtaatcagtgccccggagatgtaggcctcggctgaactccgttatcaaatatcgtgcctcggtgttgtcatcatgtttggatctcctatggcattttcttccgcgtttggtttccgatgtgatttcggggccggttttataacaagtggtatcagaacctgcgggagatccatggtagaggtacgagggaggtggtccactccgcgacgactacacagggtgtccagggacggacatagacgcaaggtggagcacggcgacgatcagcggaatttgatcggtggaatcggacactttaggcggtggtctgaaccgttcgatggctgcaatcaatagggaaatgaccagacgtggtgctcgggttgatggcggcggaagcgattggcgatccaatcggtgggttggacacttcgggcgggtggctcgaactttctggtgagctactttcaacaggaagacgtgaggcttcacgctcggggttgattgaagctggaggcgatcggcgatctcgatcggtgcaatcgaacactctgggcggggtagcccgggtctttcgatgagctgcgttcgacagggagacggctagacgtagcgctcgggtcgttcggtggctgggaagacggcatgtgatttgtcggcttcggctcgcggctagattgatgggtgatcaatcggaggtcggagtggatttgtttgcgacgaactctgggtggcaggaacacggtttggtgtggtcgttgtgtaggtgctgacgggattcgacgcgggccggctccggtgattggaggcggcggctttcgcggggagcagtggtgtcggttgcttcggggagaagcggcggcgaacctccaaggcggaggcggagacggtcctgtgagcgttggttgttcctgaccggcggggagctcgcaggggcgtcggacggaggtgacaatgacttctggcagagtcgacgcgatatccgacggggagtgcgtcggagtgtgggcagggaacgaaagaggattgggatccggttcggagtgaaccgtttccaggtgggcttaatcggcaattaagaaggaaaaaagggattttttttttgggccggttggtgaagcttgctagtattttcttggagccaatactgctcacgtgttgctagggtactgttcaccaggagcaaagctgaggacaactattacaagtcacagtggtgcatgctaaagaaactgaggcggtttgtgcttggcttgtttgcacgtggaggcgtgttaagtcaagtattggctcggtaggatagcagcacaagggtggctcgacatgtctagcagagtgtgagaaattcccgggcaacagtgggtgaaaatcgttgagggcgtcaacgggctgtttggcagtacaggatatatccagaatctgcggggattgcatgatggggatatatgaaatctacgtcactgaaggagaagagcgaacgctatggtgataatttcttcgggtgattcaaggcaacagtgattttctcaaattgtcaagttcagtctacggatgcgggaaagcgtggatgttggatttattagcttggttcataagacgacagggaagaaagggttctcttcatgtctggtgagtttgatttgtctatttggtgatgacatcggttatctggccaggaatagatcaagtcaaatttaagacggtagatggagttgagcatggtcttcgggaagtctatgatgtgacagttaggaagaattcaattcgtttggcaagacgactgtcgacctgtggtgatatgaaagaaggtggagcactgttgcaggtggagtcaagaggaagaaattatagggatagtggagtctcttgtttacggtgagtctagtggaggcttgtcggggcagctcggcatgagcggcataaaaaggattaactcaagtccgggtacacggaggttcgagcaagtaacgaattcaggttggcgtggcatattcgccaaggtggagtttgttagagtttgtgtcgaatatgtgtacgtagtcggttacagtttaggacttggagttgtactaggtgtagaactagagtatgagttggactctatcctaggatctatcataaatagaggggtgtgcctattgtaaccgcatggcgacttagcatagcgagagggagcggtagccggcggcgaccggccgtgagtcgttgtaactctgatacgctgtaatatgctggatcggggaggagcgcccgtaatcagtgccccggagatgtaggcctcggctgaactccattatcaaatatcgtgcctcggtgtcgtcatcatgtttggatctcctatggcgttttcttccgcgttttgttttcgatgtgatttcggggccggttttataacagaaagatttgcttgacgccaaagagaaagaaactaaagtgaaagaagagagatggacttccttccatctctcttctttcacaagctaaatctcaacaaagaacaagccttatctaattgcatcgacaaatccattggaaaaagaaaaaaaactaccttcgactattgccggcgaggaaaagggtgccagacgtggaggtggtttacaggggaggagggcgtcgggcgggctggcagccgagagggagggcgccaaccgccagggaggaggctgccctgcagggaggtggccagtagggcaggagggcgctagggaggaggccaccgggtagggaggtggccggcaggggaggaagtcgccagccatggaggagtgcggcgaggaaggaggtggtcagccggagaggagggcgctgatccaggcgacgcgcatgcggaggagaggctttagcggcggtgctagcaaaatttttcgtgcgaaaaaagatcagcgcgcggcggtgggagatctctcccgcatgtggaataggggccagcgagaaagttcctaggcctgggggcttgagaagataatttagaggccttcctattttagggcctttagtacgggctttgttggacctgattttttttctcaactctcaaaaattgtttagcggctgtgtttaggacccctgctggagatgctcctcctacaatagcaacgttcagatacattaaggccccatttagttccccaaaagtttttccgaaaatatcacatcgaatctttggacacatgcatggagcattaaatatagattaaaaaaaactaattgcacagttaggggggaaatcgtgagacggatcttttgagcctaattagtccatgattagccataagtgctacagtaacctacatgtgctaatgacgaattaattaggttcaaaagattcgtctcgtggtttccaggcgtgttatgaaattagtttttttattcgtgtccgaaaaccccttccgacatctggtcaaatatccgatgtgacacccaaaattttttttttgccaactaaacaggcctaaggaacgagaggatatcccttgagagataaaattaattaatctcccgcacaattgtctgtgttcattccgttattttaactgttctttacctttgccttcgttccccaaatgcttaatttagctccacaatacgtatgcagggtagaacttcaaggagatttcagagatacagcttccttggaaaaaaaaaagttaacagctactccgtccatcctaaaatattacaattcttagtacaaacttagataatcatatccatatacataaaaattattacaattcttagctataaacttgaataatcatatccatatacatagctaaaaaatcgtaactaaaaaatattagtatattctaggatggtgtacctataaaacctctcatcggtaacggctcataaatactggttcatttaaaactgatatctatgaactgtttcctgtttccacgggataaaaatatagcatttgagcaactataggtaccaatcctatatatctataaagtttatcccccactaagtgtagttaatgctaattctcttttctcttatgaagccacatcatcacctaaattgattttaacctttggatgattcaacaagggtgtaaattgcatctcttcacatcacctcaattgtttttagcctttagatgattcatcaaggatataaattgcatctcttcctctaaaaggcacaccatacaacttaatcatttataacctttggataattgatgaaagtataaaaatagataaacacataaaaaattgtatagtaggtaagaaagaaaattttagaactcatatctattatattatcacacaattctcccgcagcaatgtacggggtatccatctagttgcaaataaaattgtgacttttttaaaaacccagcacctatgagtacaagttttttaattaaccaacaatgccgattttttaattaaccggcatccataataaacggtccaagccgagctgatgggttaaggattttttatctgaccagcaactgacaccgaccaatctatcactattacagataaggcatttcctctatacatcaattcatgacatacaaatataccgtatatcaagtcctacacagaacaagctgaaattttcacaatttgaccctttgcaaaaactatttttacaaataaactgctgccaaaacttatttcaaaaatgactcttttggtcagcgccaaatcaccaggcgctgaacttagacacctcagcgtcatgtcaactggcgctgaatgccgtgccaccacagatgggagactaagtcagcgtgccaatgcatattcagcgccacgctatttggcgctgaggtgtctaagttcagcgccaagggttatttttgaaataagttttggtgacagttcatttgtaaaaatagtttttgtaaagggtcaaattgtaaaattttttgcagaacaaggcctcatacatgcatgtaaggtgtttcagataataaaagagaaatagtcctatttggacactgcgagactagtcggatcgtatacatatatgattccataattctattcggacagaggatacccgagggtataaatataagaccctagaggagcagagaggacaagagaagacaaccaatacacaataatacaagccaacgcgatcaatacaagccatagccaatgccacattggaaaacaaccatgagtaagataagccttagttgctgatatctactcgctaggacgtattcgacggatttaggtcagcccgttagaatagctaacttgctctcctattgtaatcagtatgatattgagatataatgactacaccaacttcggctaacaagagtagagctattacctgtaataagtggggttcaaacctatataaaaatctttgtccaccatcttcttactataatctcgcatataccttagtaccgactgtaagtgtcaaggatatgacataccttctatacatgagttaacggaatatgacaataccatatacctaatagtatagaggaagatatcctacaattaaggaaatacgggaaataatgttggcaattatcttcccggattagaaggtgtcagagtccctagttggggaagatgaggattccttaggcccatattccggtttatttatccgagtcctacttgaagaagaagatgatctacgccataaatacaagacctcctcatccaggcatgggcatcgaattacaggccgtagccaaagccacatccagaagcaatccaaaggaagctagcaccttaattggcgaatagatcttgtcggccattctcgacagcttctagtcggcggattcgtctagtcatcctatccctcattgtactatgtgtggtatttccatctataatacgtataaactggagtagggttattactcatcttgagggcccgaaccagtataaatctttgtccattgtctacttgatccgatctcgcgtataccttggttccaacgatccccatattctacaaacaccatctttgggtatagtccgtcgacaccaatgatttccatactctacaaataccgtcttcgggtatagtctgtcgtcaccaacgatccgcatactctacaaatactgtagacgggtacaacctgtcgacatcatccccatcctctcttctctaccttcttagccctttcttttctctcaatccatccccatcctctcttctctatcttctcggccctttctcttctctcgatccatccccatcctctcttccccatccggtgaggacgctacgggcagcctccccatagtggcgcatgacaggcgatcccctcaacgatggcctaacctccctttatggcagtcttgatgatggcacgacctctcctctacggccagcggccaccccacagtggctaaacgggctcaggggtccactcgtagtcccaacttgtagccttgcctctctcctttgccatgatctcaaggtagccagatccagccgccgatcggaatgaaaaatatggaattttcaaaagtaaaattgaagaggggagaaacaacagacccatataagagtagtgtggtggcggttgattggacatctaaaatctataaataaaaccttaaatagaatcctaatgatgattaagagtagggacaatgggcatgccattaattagaacagtcacaacggaaggagggactttcaaccagtaaaaataaaccccaatgataatcatgttcgacttttaaaatctcaatgacaataaagaggacttctacaaattataaaacgaaacccaacgagataatgaactctaaaaactgcatggtcttattcttaaaggttcttccaaggaggatgaatagaaacattggtagatcaagcaagcaaggagcggtgatgaggaagtaagaggtagcaactgacgtggcttttaaaaactataaaattaataacacgggcattgataaagttgtctttcaaagtcgtaagataatgagataacaatttaacaaattttatgtaaaatcatatgtaaaaatagataattttatatgggtactagtcgtgcgattgcatgggccacctagctagtttttataacaatggagatcaagcatgagtaaagagattacattagcgcgaaaagtgctagtagagtaaaagtggaaaacaacctttaaagaaagttgcttgagctagaattaaggtctctactaagacaccaaattaaagctaactgagcaccaaaacaaacatgaacatttaactcaaaaacagaagtactcagcggacacaaaatacaacagtaataaggaggaacacaattaaatatagcagcaataaggaggaatataatgaccgatatacagtggtgccaatttacggcgccggatgtgggtgtggggacggagaattaggccggtcgacgatgccagcgtgtgtcagcagtgcccagaggtgggtaatgtgctcgccgcccatcgtcaaatgctggacgtgcgccgtcgcattgtccgccggggtgacgaacagcatcagctccgcccacaccctggccaggagcttccacgtcatctcctggtccgggatcaccatcagctgtgtccaaagcctcgcaccgtgcacatggatgccgctctccggcgagctcgcggtcgccgtctccgccaccgccttcaacctgtccaagacctccttgtccgacgcgcagccacggaggcagacccggagctcgaggagcaccgcctcggcgatcgtccgggtggtgtactggtgctccggcaacagctccggcgccgacgacaccaggtaagcgcagtacctcgacaggctcgtcgccactgcacggtcgccgtcgccgtcgccgccgccggcggcctttctcgctcgcggccgcgtcttcttgtgggttattgccgccggcatctgcatgtcacagaggcaagtggcgatgtgccagatgagaatggcgtgcgcgcacgtgcgccacgtcgcgcctccccacgcccagtctagcctgtgttgccgcagcgcggcgcggccgccgccgccgaggacgccgtcatcgtcgtcgcgatccctcagtgcagacgcgagcgcgctctccaccgcggccgacaccttcaccgatcgcgccttgccgccgttgaacatgagcctgtccagccaccggcgagtcgcccgcgacagccagtccttcacggcgtggccaggagaggcgtggcggacgatggagtactggctcatcgtcttcttccagtacacgccactgccgcagtagcacagcacgcgcaacaccgcctcgaagaacgggttcccctgccatgacggccggaggacgtacctgcacagcatcttcaccttctgccagtcggagaagagcacggcgacgaactggtacgcctcgaggacgatgactagcgctatgatgaacatggtgagggcgacgtcgaggttgacgccattgacctcgatgcttctatggtgagtagggtggtagtgtcgcagcgagtgggaggagagggtgagcacgccgatggtcatcacgagggcgcacatggcgaggtgcggtgccgtgctcaccgcggcgtggcagatgaagggatacctcgtgtagaacaggtcgtagaggaagccgagctccacttcgatcacccggaaagctctgccgtctcgtcttgatctccggtcgccgtcgccgtcgtcgtcgtcgtcttttccctgtccgaggaggcccctgaggacaaagtccctcgtcttgggttggccggactcggccaggggatagttgctgcacctccgccggagcagcttgaacagggcaaaggagaggcaaagatcccgtcgcgcggcggcgctggcgtcggcgacggagctgcccatcagcaaccgccccttgcaccgccagacgctctcgaccgtcaccagcgcacgcgcgccgtccaccttgatcttcttgacgtagtccggcgccgttagctccatgacgtccgtctcctcccctctgactatgtacttgtacccttccatggtcaccggatctccgtcgctgccgccctgccggctcaggtcgtgctcgtaggtcatgtaatcagcgacgagcttgttgtccgcctccaacctgtcggagcgcagcgccagccggtagccgagggcgctcaacgcgatcttccccaagctcacgagccaaacgatgaagaggtagatcttgagcttcggggagagcacggaggcgtagtagtggaggagcacggagacgtagatgacctggaggcctcggttgagcagcacggtggccgggctcttgatgtcggcgagggtgtaggcggtgatggagtcggagctggcgaggacgaagaggaagaagcaggaccagaccacgaagagctcgtggtggaaaggggacgactgcatgaggccgatggtgtaggccgccaccgggtaggacaccgtgaaggcgccccacacgacgaggcggacggtggcgctgctgctccggcgcctggaggagccgaggaagacgaggagcgcgaggatggcggagcagaagagcaccaggagttcgatacgggccagcaggccgaggttgcagcctgccggtagatcacccgtggttgcattgcagaccagccgcggagccggctccggtgctacggacggccgccgcgacatcgatctctgattcgaagattataaatttccgaggaaggagcgtgactgtatgattgatggacaaaagtcacaaaaggccagctgatgcacaaatacaatgtactacatgcataccaccctatttatatgcggaaagcctgaaatcacaccttgagagagtagccaacaagctgggaaactaaatatccactcatttattttactccctccattttagattacaatacacgttttaactttagtcaagtcaaactactttaagtttgactaactctataaaaaaaaatttcttaaaattttttttttatagagttagtcaaacttaaagcagtttgactttggcaaaagtcaaaatgtcttgtagcctgaaacagagtgagtatgtcaactaaatgattatgataaaatttcaagacaaattgatataataaattaatatgtactccctccattgtataatataagggattattccctttaggtaaagattactgatgaaaagaaaacactacaatatccctattaaatgtgatttcggttgtggtgagcgggtagttggaggttgaaataggtagaaatttgaatgagagatgatggatgtgacaagtagtatagcaaaatctcttatattatggaactagtagaaaagataaaatcttttatattatgggatggagggagtaatacatcactcaaacatgcaagtgtaaactcaatttaactttataagttgtaacaaaaataacaaattaaactccaactagtatgttggctcgcgcaattgcaggggtaacaccgtcataaaattatctattttttttacatatgattttttaaaaatatttattaaatattcaactcattgtcacgtacgtgatttttaaaaaatgaaccttatattatcaagtttacaattatttagtttttaaaagttacacacgtgcctccctatactcctctgtcgctcctcctctacttgctcatctccgcttctattcatcatcttcgggactttataattttttttatctcatcgatttatattttcttatagttttaaacgtaccattgaccgcaaccatcctacttctttatattccacctatcatcccttctctttattattataagaattaatcgaacatggtcatcttttgaggttccgttttcatagtttttagaggtcaagtcaatttccaccaccctactcttaacagcccgcccaatgccctccattttattttattatcattagaattactcgaacatggtcatcttttgggttccgtttttataattctttgaagtcaagttaattttcatcatcctactcctttactccttaacagccctactccttaacagccctcccactgctcctcctttttattggtattgggattttaaaaaccaaacctgatcatcgttggagtttagtttttatagtttttagaagtccgatcaactgttaccactctactcctttatggtacggccaccacccctcctctttaatgtcattaagattttaaaaatcaaacttgatcatcgttgggttcccctttatagtttttagaagtctcgtcaaacaccatcacatactcatttacgacccgcccttcgccccttctatttgttggcattaggattttatgaatcaaacatgatcatcgttgggttatatttttataatttttagaagtctcgtcaaccgctaccaccttactcattatggcccgcatgtcatccttattttgtttattatttggattttaaaaatcgaagctgttcgctttgggttccattttttgtagtttttaaaaatctctactcctttataaaccagtccgtcattgctaggagcctaggatgcagctgatatactatccatcgtgccatctcctctaatgttggttgtagcatcaactatggcatcgtcaagtgcttatgtgttcggggtgaagtcggagctgctactggtatgataagcttggcaatgattacacttgcctccttacatttatctttgtggagaaggtactagcaaaggtcgtggttggtatgatgagctttgggcgaaagacttgtcccggtcttcacatggtgacacctgtgacaccattccccctccttgtggtcctagccgtgttgtttctctctttacttcacttgaaaacctagttccggtgctctggatgagcattgacaatgtcttttggtgtggtgttctccttgaaggctttgtcaagaagatcacgctctatgattgggtggtggccagtggccacatccccttaattaggttgtgttcttccctcttctttcccaactcacctccctcatttttcatgtgcacgttttttaaattgctaaatggtgtgttttttacaaaagtgtttttataggaaagttgctttaaaaattatattaatttattttcaagtatttttaagcatacttaatcaatcacacgttaattggcaatacggtttcccgtgcggtcccaaactcagccttattgttagcagcgacgtcaagctttcaggttgaagatcgtcaccagaagttggagccgctggtcgtttttggctatgagctgagcaacaatgagtagtaacgggtttctttccggtcattgtgttctggtgctgtgctacctaagttgtttttgttcttcgggggatttttttcccggttccctttcaattaatcgtgtagttgtaatatttttgacctggtttcctcacaatctttgccaaatctcttcttcttacacgagaaaaaaaaccatttttgacccgtcatgtatgacagtctttggtgatattctttcccacttcagtgttaatatgaaactgttaaattatccaacctttctttacagaaaaaggtccaaataccctcttaaactttgaataagtcagtttaacatcctaaactttaacatccaaccccctaaactttgcaatataatctatattaccccctaaggagttcttaatggtagttttgcatattttggaagcttaaacgaataattttgaataattaatataacatattaacatatcatcggtagtaagtcatcaatttatccttacacaattattaccatactactattatgattgtacttgttcgtaactgagaactaataaagggaaaaagaaatattttagtggagattttcatagatatgtccaatgtgtaggccacgtgatcaaactcatcgaacttatatacaattagataaaaaccattctgcgaaacaatctgagggttacataagtaaaaatttgggtggttgaatatccgtttcaaatttcagggcgataaacaaactttcatccaaagttagtttagtagggcatttggattttttttccttttctaaaccatgttcaaatcccagaggtgacaaatattaagcatacgcatgtgtatgtgctttaaatagataaattttcagtaaggtaagagatttgcggttggcctcttcccttcgagcatgtgttacagagacaccgggcatattcgtggtgtgagcatgtgtacccaatgggttggcggcacaacccgccccacttacacccttatgtgtaggtgtgtgcatttgcgtctttcttgtaattgcaaaaagattatacctttctcttctttccattccctttctttgtttttttttattttctcttattatcggatccatcctgttcttctccttctcatccctctgcattgcgggcctaacccaccccggtgtgcgccaagccaagtatcatattcctgctgctaaagaccatgcctgcacatttgtaaaataagagcatgatgcgttgtacctagctccattttattacccaatgaaaacaaaaaaccgagaacgatatgtgtcttctaagatcattagctacatgataacaaaggtgcatgaaacctgagacagcatcatgaactgtagcttttttttttcggggaatgaactgtagctttatgagctgatgtataagagcaagtttaatagtatagccaactactagctccaattcatttataaccaatctaatagcttattcatacaatagttacatactacactattaatatctggtcccacctgtcatatacacactgcgtcttggagtccgtgctacagctggctataaatctgtagcccgctgctcttctctctccttatttatctgcttaaaatatgtttacagctggcttatagcctgctattttacctgctctaatctacaagcatcctgactttagtggcatttagctttatgaactgtaattgttaattgacattgatgctactagctctacgaaggaacaaaccaatctgacagctaatccactcgctcctaattaatcataccagctactccctcagtcctaaaatacatgtatttttagatttcgacacagtttttgaaatgatacattgatcaataatatttataaaagtaatatgttttaaataaaattttttgcatattatgatagtttatttgatgataaatctattaacatcaatttacgcaattgatcttttttatttgttcgctattaatagtcaaagttacaaagattttgatttggaactattctaaaaatacttatattttaggacggaggaagtagttctcaacatgaacaaatccatatctgcatgtgcatcatgttttgtttaatctatgtagctttttttttatcatgcgtcatgtgtatgtttatattaagattcaggagtaatgtgcctcacaatttcacaaagctaacccaaaaccaaaagacaaaaaagagaatcaaaggaaaaaaggaaaaggatgggggtacagaaggctatttcccacggcatcaaaagagtgaccatattaacacattcaccaaggccagaaagcgcttcacgagcgctacctcgtaagtggccacgcgcatcactttggtccaggaacgtgactactgatggaagacgcagttgttgcgctcgttccgcttccgcatgtccagggtgataacaatattgcttggcctcactttctttcttgctgcttgctcaccatcgggtaacggaaaaaatggtggctgcccaacggcgtgcatgcttgcaataccagccaccaaagctagcgggactcatggcagcccaacaaaatgtggtcgatcgtttcctttgcttgattgcaaaagacagaactattgggatgggggggagcctgcgttttgcacaggcggccggtcggccgtcctgttagataacatggtttctcaagataagagatatctctctattctaaattgatctacatatagttttttttaggttatttctaaatgatctacatatttgtgttcatttattgagtctattcgttattcgtgcattggagtaaatggatattgatgcatgcatccatggacacaagtatttataactcacatgtaatatcttgatttgctattggctatgaaatattggggatggtgcatgcattgaatttgttgctagaataaatatagtatgaaagagttattagctttcttggttatgatttacctatgaaatatgtagattaatttggaatggagggagtagggttgttggcgtgcgtgttatccttatctctgtacaccggttggttcccgattgatcaacagatcacgtgattgttgggaacaaaccatcgcgatgtatgcgccactgcgagggctattctcacctatatcaatagagatgcggccctgagaagggttcaacgcttcccacgtcatttttctacatggtatcagagcgagatctaatctaatccattctcccagccgcaccgtggcaagttcctcgaagacccataccgggaatcctctggtcggccaatttttcttggagaagttaggaaaatcgaaccacgccatatggaaggcgcaggttttagcggctgtgaggggtgccaagctggaagggcacctcaccggagcgacaagggttccggccgccaccatcaggaggaaggaaggcgatgcggaggtcgtcgtcagcaaccccgattatgaggaatgaattgctgttgatcaggaagtcctctcctacctcctatcctccatgacaagagacatgctcatccaattggctgcgtgcaccacggcagcgacagcatggagcatgattgaggggatgttctcctcgataacaagggcgcagtgaatcaacacacgcctctccctcactaccctgaagaaaggagacatgacggtggcgaactacgtcggcaagatgcgggcgctggcagacgagctcgtggtctccggcaagttcgtcgacaacgacgaactcatcagctacatcatcgccagtctcgaagaggattatgaacatgtgatccaatctatcgtcgggcgtccagatcaagtcaccgtcagtgaggccttttttcagcttctaagctttgagcacaggctactgctgtgtcgtggagaagaaggacaagcctcagccaaccgaggacagtcacacaacacaattggtggcggcagcaacaaccgtacccgcggcggcagcaacaacgtcggcaacggcaaccgcggcggaagaggtcgtgggaaccctagcggtgcccgcggcaatccaggaggtgtcgacaataggcccaagtgccaactctgctacaagagaggacatacagtaaaggattgttggttccgttatgatgaaaactttgttctagatgaaaggtttgcaagttctgctatttcatacggtgtagataccaattggtacctcgacaccggtgcaacggatcacgccactggcgagttggagaagctaacagtgcatgacaagtaccatggcaatgaccaaattcacacagcaagcgaagcaggtatgaaaattagtcacattggcaattctgttgttaagacccctagtcgcaatctctatctaaactagaatacaccccgcgcgttgctgcggtacttttagttgtcactcgagatgtcggcttatttaaaacaaatgaataaaaattatttgtgtagtgtttacttgaaaaatacagtacagcatagtgaaagttgggtcggcgctgccagacaacctaaaatgaaatatcacatggcccacaggccacagtgacatgttaagtcaaatagcacattcctatagatgaagtttacaatataaatgtagaaatagttaggataaagcccaattggatgaacttccaagccccacaacagcaagcgatccaaaccatcacagattggtggagtgagctcctgtaatttcatacctaaaaaaaggatattgtgtgctttgttgacaatgtggtggaacatatggctggtacacaatagaagaattttccaacaattgttgaagaatgaattccaagtcgcttttctagcgaaggaaaatattagcctaatagaacaatcaaggatctgtctgtttcatgatccttcaatcagtcactctctttttttatgtaaataaatcctcatatattccctagatgtttttttttctttttaatagagatatgtaaggctctggtttactacttcttttctcgttctaatatatccggcaaatctcctaccgttttaagtataaaaaaagaaatagttaggatattacacccttcattttattctattcaatcaaataaaagaataaaagaataaagataggagccgagactccaataaatataacatcagataggagtagagactccaataaatataacatcacaaccgaatatgcataatgtgttgaactttcaaactcacagttcaaattattgaaaaacatatgcaattcaactcacttccttttcttgtctcactattaagttaagataattccaaggttgcagcaaccgctactaaaattaatgcaaaacaacttagtcagtctacagtggtagacatgatcaaggggaaaagaggattttaatggcgtaccgtcaaaggaattatttgtgcagtggttcaatgaagaaagctcccacctttcttgtttcctgtacaatacagaacaatacagagtatcaaaaacctttttaaagttgctggacataggaataaccatattatgctaatgctaaaaagatcagctgaaaatacaacatcataagaagtgtaaccaacaatgaaaaaagggtttctaatagcatataaaatgaaaacggcttcaaatattattcaacaacacagggcactaaacaattatgaaatttatgttatcatgcgaaaaattaagagaataattaaaatattaattcaaatacatactggagacaaaaggaaaggataatgggaatgtattatgaaagtcaaatagaacctcaagcaaaactgcaaggaaattaattagagcgattaatctatgaaaatcagaattggtgagagagagacggagacatttagcgagcgagcaacaacaccgagcatgtcattatatagcagcaatcaccggcatcggcatgtgcatctttcacatgcacatgcacatgaacatgggaagaggaagaggcaaagtaaataagtgtgtgactgttagcggaaattaaagagctcgtccttgcgtgaggggaggagaagcggcgcaatgcggctggagcgtgcagggaatgggggaggcagcgccgtggggcgaggagaagcgaacgcagctgagctggcgggcccgctgatggcatgcgcagccgatgggggaggagaagcgagcgctttgcctggaggtcccacggaggtgaagcgcgagcagcggcaggaggagaagcgagtggatgtgtgatgcggcagtgatcctgatcgtttgattagaaaccaacggatagagaaaaaaggatggcgtggaagcactaagatgcagagaattcctagtagtggggatgatttgtataggtatataggataatgttctctatgctcccaaggcaaacaaaaatcttgtttcagcttatcgtcttacttgtgataattttgccttcatagaattatatcgtaaatttttctgtataaggaactagccacgaagagaactctgcttaggggtcgatgtcataaaggactatatgctcttcctcctgcatcgccaagccaacaccaaataaagtcttcacgccatccttcgagaggtggcatagtcatcttggtcattcttcctacactgtcgtagaaaaggtcattaaaagtcataagttgtcttgtctagatgtgtccaataaaattgttgtatgtgatgcatgtcaatgagcaaaaagtcatcaattacattttcctaggtcttctagtgagcctaaatatcctttggaactaattttttctgatgtttggggtgctgctccacaatctgttggtggttttaaatattatgtgagtttcattgatgataatagcaaatttacatggatatatttgcttaagtataagtctgatgtcttttagaagtttcatgattttcaacaactagttgaaagactttttgataggaaaattatagccattcaaacttactggggtggggaatatcaaaaacttcactccttttcaaaaagctggtaccacccatcatatttcctgtccacatactcaccaacagaatgggtctgctgaaagaaagcaccgtcacatagttgaagtgtgtctttctttattagctcattcttttatgccactaaaattttgggatgaagcttttctttctgcactctatttgattaatcgcacccctagtagagttctcgatgacatatctccattggaaaaactttttaccaaataacctaactagatgaagcttttctttctgcactctatttgattaatcgcacccctagtagagttctcgatgacatatctccattggaaaaactttttaccaaataacctaactatacagcccttcgtatctttggttgctcttgttcgccaaatttacgtccttataataaacacaaactccaatttcgttccaaagaattcacgttccttggttatagcatctttcacaaagggttcaagtgccttgattcctctactgggagagtttatatctctcgcgatgtagtatttgatgaaaacaaatttccttttgccaaattacatccaaatgctagtgcacgtctccgcgccaaaattaatcttcttcccgatgcatcatcactagtatccctgggtcaacaacagcgttgtcatgtgattaattctcctgaaagttttgatgaaaatcctgaagttttacagcaaatacatgatgatttagccacatatgacaatgaggacagtggttcacaacaacatgcgggaacggcgaccgaatctgcctcgtctgccgtgatgctgtcctcgggatcggtgtcgttgcattcgcctacttcttccgtgccgtcagctccgacttcaccgcccgagcaatcgcatgctgccacgtcttcacccacacgttcttcagcgtcctcgggaccccagtctggcgttggcgcattcatgtcatcgtctcactctgctgcggtagattccacgtcaggatcttctggtcacacgagctgatgagcaccacagaagatccatcatcagctcagaataatgatgatgatgatgatgatgatgatggtcctcctcgtcctcgcacaagtgtgtggaatcagaaaggagaaggtctacactgatggtacagtaaaatggggcctttcaatctcaactggtgagccacaaaatttacaggaagctttgagcaataaaaactggaaagatgcactggatgcagaatatatggcattattcaaaaataaaacttggtatttagttcctcctcagaagggcacgaatattattgactgtaaatgggtttattaaattaagaggaaacaagatggtagcctagatagatgtaaagcacgtctagttgcaaagggatttaagcaacactatggcatagactatgaggaaacatttagtcctattgttaaggcatctgctatcagaattatcttgtctgttgcagtctcaaaaggggatggagtctaagacaacttgatatacagaatgcctttcttcatggagttcttgaagaagaagtctatatgaagcagccaccaagttatgaaaattcttctaatcccgattatgtttgcaaactggataaaaatttatgtgatttgaagcaagcacctagggcctagtactccagactaagaagtaagttatatgatcttggttttagaggatctaaggcagatacatcgttattcttttataacaaagcagacttaaccatgtttctgctcatttatgttgatgatataattattgtaagtttaagaaaggatgcagtaccagccttattgcagtatctccagaaagagttagcacttaaggatcttggagatctgcactattttcttggtacagaggtaacaaagatttctaatggaatattattaactcaagagaaatatgtatctgatttattaaaaggaactggtaggagtgattgtaaacaagtcaatacgccactgtctcctagtgaaaaattaactgctaacgaaggcacaattttggaataaaatgatgctacccaataaagaagtattgtaggggctctacggtatttaactctgactagaccagataactagaagacaaaatcattagtatcttacacttaatggttagtgcattatacggaccataaacatgaaacatactcctatggttcgtcttcattccaaattgatgagttgactgtcaaatgaggcaatgagttgctcgtgagccaagctcaggttgagcacgtttcacactttcactcacgagtcgcgagctacagagtaagctcgaggcctcgagttcagcttgcttggactaagcctgacctggcccattgccatccctactgcttggtataggagccaagttagcttgaacttgggctgagcccaatcaaagtagatttctggcccaacctcaagaacagtcaatgaccatgatgagttgggtgcaattttcttcttccaaagaaatggtgcctgtgagctaatttatgagctggtcgcgtaccgggaaataggagccccgttcgatagggagattgtggcttggagtttttttaaaaaacttttaaattttttaaaaaaatacttctaaaacttattttccaaatccgaatcttttatgcatgctaggatgtctggcgtgacactgtcacgccacccacaacgtgacaattttgtgtccgaccacattagccacggtggcgtggtaggacaacgctgccacgcccaccagaccagcatgactaaataacgttgacatgctatttagatcagtgtggcagtattattttgccacgacagtctgatcaaaatgttcagatattaaaaataagtataagaaagtttattcttaaaactaaaaattaaagaagtttaaaaaaattatttagcttactctctccgtcctaaaataaacaaaatttatatgagatacaatattttctattactatgaatctggactccacctcttgtctaaattcattttagaccgttgtgcaacagtttcatttttttttggacaaacgatgtaagtttagaagccacccgcaaaataatcaagataattaatgtatgattaattaaaaattagctactgtaaacttgaaaaataaaattatttgattttctaaagaaatatctatattttgcaaaaaaaaatataccatgttaaatattttagaaagtttgttcacagtaagcgaacaagtagctccatttgataagaaaaaaaaaaagcattgccttaagagcaagccagatagcatagcgtttttgcccaagtgcccaactagggttctatttgaaggtgcacgaatgggaacacaattttcctctcacacgtataacaaagtggatcattagcactttactaatttagtattaactaaaaaataaaaaggattaatatgtttttttaaaagcaatctttctatagattttcttttttaaaaaaaactatttaacagtttgaaaagcgtgcacatgaaacaaggaatagagaagttagtaaagtgtagataagaacaggtctctgcatcaaatattgttctttttaatgcaaaatcatttgtcatttcattttttacacttaaatgaatgccttttacatataagtcattctagaatacctatgcattctttcagttatgttcactcatgccaaataaatgtgtgatcttttgcaacacagtataataaatacaagtggatatatatatagtaagaatttagtcaagttaggtctctttgagtttgtattaagagatacatttgtgggtccatgggtctataaatgaggtgcgtgtgcatgttctgcgcataatcgggaaaagggtcaattaagctccttttgtaattataatttttattttttgttagcacattttccaagttgctaaacagtttgttttttcgaaaaaaaaattcaaaaagaatcaagtaaactttttttttaagtttataataattaatacttatttaactaagcgctgatgatttttttttcgttttctgttctctgaaaataccaaccagattgtccattcgtacacaccttagtcatttaagctactttcttgaagcttgcacaaaatgttaaaggacttacatttcgtagaggagattaatgcatgccgtgttgtcttgtgatgcggtccttgtagttagtagtcccacctaattccaccctccgtgcagcggcgcacccgtgtgaggaaagaagcgcaatgtgtgtgaggtggcgtgagtcgttcaatgttgatctaacggtcgagagatggatgtatcaagagggtttgcaataccgctggctggttacctcaattaccgtgggggtccgttaagggtaaccggcggtatgttttgataaatttcatctgacttcaaatttaaaaggaaaatgtaaaaagctcaggaaaaaatcatggaaatagtacttaaattgcataattatctgctgaaggaatatttttaaaaaagagtctgttaacatcattatctcgaggcaaacattaaagataataaaaagaacaagtaatatagggcaaccagaggtggtggtgctaatgggtgatcaccagtgaccagtcgcacggggctgcatctgcgcatgcgcagttagagcggagctagcgtcaaaacaagagtggtgtagtaccactgaaaatataaaaatattctatgcaaaactgtatattttagtgtttttaagtgtggaattatgagtttaaggggttcctgtgcaccacctaaattcaatgttgagccactgcgcacggttaattagggccccttagttctctatacatatatttgtatgcatatataaagtttatacgaatgtatatgaagtatatacagacaaatacagcacactaagtgtcatctagtcacgtagcgcatttggcctagcgtgctagtaatttttttactatatcaatatctcgcgctcctctctatatggattggttgaccagcacgtaagaagtttttttttttactttgaatactataggtgggaagtggaagctcttgggaatatatagtaaaagaaagagtaaattttactttcggcctcacttttttattattaatattttgttttagaccatcatttaaaaaatatttttactttgaactaggtaaatttacctttgttgtactttgggtcactctcaactattttacctatccgcataaacttgtcatatatcaaagcaatagtctaaacatgtccgtgcggagttcattaacgagtagaaaccaacgtactcgatattgtttatatgcttgagaagagtgtggtgacggttcaaagtgtaccaaaagataagattacccggtccaaagtgaaaatattagttaaatgtgatccaaagtaaaatttactctaaaaataattaccatgtcgagtgaggtttgggtgttgcattctcctgagtcgaaagtttactattgatttatcctgaggcgtgtttataaaaaaatagtgccgtgtttataaaaaattaaatgatggatacataagttatatggtgttgttcagaaacttacaaacgatgatggatacacaagttaatatgtgttactaaacggtggatgcgaagttacgtgttactagaaaaatcacaatgttgcgaaaggccttgtagcctaatggttataagagcctcagtagcaccttaggttttgggttcgactatccatgggaataaatttttcaggatttaacaacattatgttttcagtggtaggcgatatacccgtcgacagcgagacgtctatggtgacttcgtcaatctccaggatttgcgttaatacaacgaatctggacatgctcatgtccagattcattgtactatgaagtgtcccattcttgcctgcatgtccagattcgttgtactataaagtgttacatatccttgtctaggttggcttttttgggacggagggagtacgtgttaggccctgtttagattctaacttttttctttaaactttcaattttttcgtcacatcgaactttcctacccacataaacttttaacttttccgtcacacccttagtaaaaatatcactgaaagactaatgtgggagtgattcgtgtcagtaattttattactgaacaatctctgcggaagttcttgtaaaaaattactcaaagagcaattaagaaagttagtgtcaattaattttttagtaaatttattacttttaggatacggaagtgggagagcatggaggctccggaaacaacgagtaattttttttactctttaacggatggtgaggtgaaagaacttgtgaggcgtcctacatatagctacgtagcagtgtagcaccttgcgtgctatgtagcgttaccaccatgctttaatctatggtagtgtttgaatattctgaacatgaaaatgaaaataaagattaagtttttcatgtaaaatgagatggtaataacgtatgattaattaagttttaattattacaaacttaaaaaatagattaatctgatattttagaacaactttcatataaaaaattttcacacaaaacgcaccgtttagtagtttgaaaaacgtgcaacattaatctaaaattttatccacccttttaagtagattcgaatggggccaatatagaaacatatatatacatatacatatacatatttatatgtatacatatatatatatatatatatatatatatatatatatatacatatgtatatgtacacatatatatatacacatatatatatatatatgcatgtatacatgtatatatatggatatatacatatatatgtatataatatatatacatatatatatatatatacatacatacatacatatatatatatatatacatacatgtatatacatacatacatgtatatatatacatatgtacacatatatatatatatatatatatatatatatatatatattatatgtatatgtagattgttttaaggtaacagttagctatactattaaacttgtctaaaacggtatggtaaatcttaatcaagagttgtgtgaaaattgcttgtatactgtttagcttaattgctcaagttttttttataatgcacgaaaacatattaccccattagtttcagattgacaatttatcccattcagagaatgtactgggtactacggagtactttgaaaagatcaatgcaagtcgactgcacacgctcggttttcaatacacgttccgttctccacacccaaagaagcacgtacgccgtacatacaaatctgcgttcagcaccaggaactttcctaacccaaaccaaccagattaccgctagtcaaattaaacagacatctcccccaagtattcctctctccctctccttttcttttcttttcttttcttttccagggcaaaccaagcgagagagacttcaagaacggacaatgaccataatgaattttgtgtaattttcttcttctagagcagtggtgcctgaaccaaatttatgaatggtcaggtgtcttaggccatgccctacgcaccactgtggtcaacccttcacgtcggagacaagccgtggctttgggaaccatggctctgcgatgccttgccgcacctgcaaagatcatgattgcctcggcacgagtttgagagttgcaaaaccactgctttggggccacacgttgggtgagctcgtgtccccatgatgtggtcatgtccactgaactccccctaacaagcgtggtgggatgaagcagtggccagaagcaaaggttacgagaaatggcggccagatccagatcagggtgacctaccttgaccagatctgagataacgacggcgatagtgaaggggaaaggctgacctcatgtccatttatcgcatggggctcgtcggccttcagcacttgaagctcactaccaccgatctcatcaccctctggcgagcttgtggttgtatgcggtggtgacctcacttcatcactaccgtagtccctctcgtcagtgaagcggggatagggctcgagctcggtggagagggaagagagcttgatctcgtcgatcggagaggagatgtgctagctgccgtcggcggagaaggaaaggggaaagaggctagtggtggaagaggaaggcggcgcagtggtggatgaggagggagagaggcggcgctacaacattggaagaagaggcgccactatggtggcaaaagaggaggcggtgacatcgagactcgaaaagatgggattggggtttcggtggccggtggagaatccgggggggggggggtaaggtggagaggctgatagtgggaccatgtatagtttagaagtatgtatgtatttctttttactattataaggcccaaaatataaaatttctaattgattcaataactaggggcagacgcataaataatcaggggctgaaatgaaaaatatactcaacaatagtctctgttttagattgcgtggctttcatttgttcttatcttatttggcatgctgagacattagtaccagtggtcttcactgtacatgtcgttaagcctggttcgatacagaattcgtggcttttaagccacatgcaaactaaaacagtcatattaattaaatattatctattacaaattttaaaaatagttttatatagtttttaaaagaaatctctatttggaaagtttttagaaaaacgtcgtattcaataatctggaaagcttgctctcggtaaatgaggtagtaaatgaggaagtagctagctccaacaaggaaaacgtaagccggatagcatagggtgtgtttggttgctcgtatggatctagcctggctcttctccctcatccaggctagagacatacagatgcagttgtttggttgtctgtattgaatgagccaggatgtggttagatgttatttggttggctgcataaaaaggtggatggaacacttgcatacaagagatgttgtttggttggatggatacatctttgggtgtagatatctcctcttgtgggtggtgaggttacgaatatttctaaagtaaccattttttctataaaaatcagttatacttactaggcatatgtgttttcttgagatggtcatttcagagtacaagactaaaatgagctgatccatctccgttctctgccttggtacagccgtcgtcaagataatcagcatgcatatctacaagtgacaagatttgacaagaagagaaaagaacatatttctgaacaaaattctgttgacaagattcacaaagagcggtatatatcagaattcacatctttccagggtaccaagctaacagcaagaaaaatgacatgtgtagacaaaaaatgaaatgagcagtatatatcagaatccatatgctcacatcatatatgcagtcataaataaaagcttccatgcttacatctgttcttatgaataaaacagaggagcagtgttcatcatatctagcttcttcccaggtgaccctaaaaaatatgaacaagtgtacaaaatatgttcttatttatgcatcacaaatcagcaccattcatcacgtgcatccttcacatttgcactattcatcagaaatgaccagttgcaaatagtttgaccaagtttgcatttgtcggtacaaatggatgaacaaggaacaagaataaaacaagtgcagaaggacaatttaactcatgtcattgcagcatggaaaacaagtgcagaaggatgaaatttaacatgaggcagagatcatgcaacaataatatggtgtccactacacattaaccatcacatagccatatgtgcatatataaatttggtgtcccactaccaccttagtcagagagtaaccaatatcctaccaaaaaaaatcgaaggaggtgagaaagggaagaggaataccatctttgcacttacctcagatcttgacagagagagctgaagacgagaggctgtgaggaagacgagcagccggcggcgtaatggggaggatatgaaaatcatgactagttttttatattgtgattgctctaatgccatccttctccgtgtgcatccgcgtgaagaaataaatacaatatgtgtggacaagttagaagtggcatgggtcgttcaatcgaacggtcgagagatgtatgaagagcagtgttaaaattggttgtgctgtttagcttaccaagtgattttttataaaacaaattaccctattattctttttagagtgacaaatatccctatctagaggatgtagtactactttgaaaagatcaataaacacaagtcgactgcacacggtttcataatacacgtcccttctctacccatacccaaaggagcatgtacgcagtacttcctccgttccaaaataagtgcagttttagcattgttcatgtctaacgtttgaccgttcgtcttatttgaaaaaaaattatgattagtatttttattgttattagatgataaaacatgaatagtattttatgtgtgactattttttaaatattttttataatttttttaaataagatggatgattaaaacgctcagcacgtatatttatggctgcacttattttaggacaggatagtacatacaaatctgcgttcagccccaggaactttcctaatcctaaccttctaaccaaccagaagattaccgctagtcaaacagacatcttcccccaagtattcctctctctctctctccttttcttttcttctttttaattttcattcaggggcaaaccaaaccaaaccaagcgagagagacaacagcacaggacagcgcagggtggactcgaggtggaccccacctgccagtgaccgccgacctccctctctcctctcgactctttcaagctgcgagacgagaggagagcagatcgcttacttagccagagagagagagaggagagagagggaggagaggttctcgcggcggcgaatgattggggcgcatgtgtgggacaaccagatcctagctgctcatcgcgatacaaatcccatccccgtctcccccccaattccatcgctgtcctccaatctctcctctctcccaatcatcgtctcatctgcgcgccgtctctccccccgattcggcttcgtccccgccgccgtactgcgccgccgccggtgccgacctgctgctgctgcgggggagatctgtccgggtgtgcggctgattcgctttccgtcggtacgatttctcaagcttttgtttggggggggggggggggtggggcggttcgatttgctgtgtgcgcgtaggtagaggctgcgacgacgcggtcaatttcaaatctagctcgcgggaccgcgtccaatttcgtgcgggggcggctgctgggttgcggtagattagtgatttagtggtcgcgtttcgcgttcccgagaatggtcggcgattgtcgacttggggggagagattcatcggtccgcatctcgaatgagcttgttgtagcgggttgtctactagtaacgattagttcaaattttagggagctgtttctattgtgtttgaattttgaaccaacttatgctatttgggaagcactgatttgttgttatcttgcttcgttgtgactgtggtttgtgaatcgacagctgcagctctacaggtttcttcggcagcaactgtagtagaaaagaaagaggggaagattcgcagttcatatggcaaaacctgctaatagcattggccgtaggtaggtttgatactgcagctactgtttattcttaactgtttcttttccgtttctagcgctgattgataatttatctgttgcccacttgtctagtaacaccaaccaagtgttctttttctttctacggtgctcatggttgcacattgtaatttaattgtgaacattcatcatcaacagcacgccaagatcaaatgaggggatgaggctcatattctcggcagttgttggtgttatgttgggatacttgtttggggtttccttccctacagtaaatataaccaaggtgaagtagatcgtttgcttctcttgttttttctcatcatgtattttgtttaggaaaataatctttactttctacattactgcatttcgcagcttcacttcccttccagtattatctcctatatagaagataggaactctggcatcacaacccagacattgttaaatcatgcgtgggcatctgcaaatcgtcataacaaaaacaattccgattcaacctctgaagaagttcctaaggtacgttcacatcaatacttctaatactttttaaggttgtttgtattagttgagttgggcaatattctagttgggttggggactacattttgatatgtggggtctgttaataccactcctgtgtttctcatgcataatgtgtgaagttctaggctgaaagattacatgaaggacgatatcagggttttctgtctatattaaaagttttctgttgcatcttataaaattatgataatcgatgattgaatcttgaattgtcgatattagtgtactacaagggactcttctcaactagtaattaactgaaaagtagttggttactggtcatagaccacatttcctattgtttattttgttttaaagtcacatgcaattctttctgcagatttatgttcccacaaaccctaaaggtgctgaaaggctcccaccaggcattgttgtttctgaaacagatctttttccacggagattgtggggtgatcctagtgaggtttgtggtttcttttgttgtaactttgctcagtagggcattgaattagatggtttctatatcatttttcttctatgatatacaatctgaaacatatggtcgtactgtcaggacctgagtagcgaaccacggtaccttgttacttttacagttggaattacacagaaggctaatattgatgctgctgtcaaaaaggtaactgagacggacatcttgcattgcttaaatttggtgcatcaatcaactataccctgtaacagataaacagttaatcttgcattccggtgaactggtagtcactttttcttaatgtaaatatgcaattattgcttctgaattcatagaagcttttcatatagttttcagataaattcactatcatgctattccattatgatggccggactactgaatgggatgaatttgagtggtctaaaagagctatccatgtgagtgtcaggaagcagactaagtggtaggtaaaggttattgttattattaatatgttatctgtgctgaatccatttgaatttttgctgtgaagtcttaatactgtatgtacttgttgttttacctaaggtggtatgcaaagcggtttttgcatcctgatgttgttgcccgatatgactacatattcatctgggatgaggacctaggtgttgagcatttcaatgcagagaagtaagaactgcatttttgttcctttatctgttgaccttgtgttccacttgggtgcgattatgtttgtactctttttcaggtatattgaacttgttaggaagcatgggctagatatctctcagcctggtttgcaacctgacaagggactgacatggcaaatgacaaaacggcgaggtgatcaagaagttcacaagtgagccgctgaatccatatggttttattcaatgattaatcgttggccacctatataagattcttgagtaacttttttcttcaacagagttactgaggagaggccaggctggtgcactgatccccatctgccaccatgtgcagcgtaaggggctaagggcccagaattttattgtgtatttaaatttctttgcccaaatatctgtattacattcaatttgatgtgcagatttgttgaaatcatggcaaccgtgttctctagggatgcatggcgctgtgtctggcatatgattcaggtggagtggcactacatgttcaactttaacattgtttataacagtggtattcttacacactgtcttctgcagaatgacttggtccatggatggggtcttgatttcgctctaaggaaatgtgtggaggtactctttgtttgttcttttcctatgaagtgacctaggaaaaatgatgctgactttatgggttgattatattctggggtggctggagtgggccatgaaatggggtgggggttgggattcttgggaagaagctacatatattggatttttgtttttgtggttggatagtgggaaaccacttctcctgaaccccgaatagcaatgagagaagttcagagcttctgttcttagtctgattaacaacattaattcacctaaattttgaagtctatcatcagcaattatttttgtgctccgccttcatatcattttccacttcgaatgctattccaaatcatccatggatcactgagcttaaacacttctgttttacatgaaattaatcagcctgctcatgagaagattggagtcgtcgatgctcaatggattgttcatcaagctgtgccatcacttggaaaccaggttagcccctagccaactatttagtgtactgtccttcattttgctcagtgaaactgtgtaacctgatcttgcactactttaccttgcagggcaacgcagagaatggaaaagcaccatgggaaggggtaagcaaatacatatccttatgtaatctgcagttttaaatgttgtagatattcccaacgcatgaactctgtacagcacataaattcctcttacgatggtacgttttgtctcaggtaagagcacgctgtaggaaagaatgggagatatttcaaacgaggctggccgatgccgagaaggcatactacttatcacaaggaatcacaccacccaactcgaccctagtttagaagaacacacgaacacgacacgacctcacctgtgatggcaaggtttctatttcggcaacctagctggaccttccatattattcagtacgttcatcaaagcaggtgcctctatatagagctacagttcctttgccagatttgtacatggaaagctctcgtggatcccacgactactgtttaatcctagctttggttcagttggttctagtctcattttgtttttgggtagtgtgactagctgcgatgtaagtaggcgatgtagcatggattctgagggccgagcactttgtttatacaatctgttgtatcattgactggatgcaatgttggcgttgcattgattcccattacttgtttcatcatgtaaattattcagctggtcttactgttttatggagttaaggtcgagcattttgttttatgccacctgtgtaatcgcggccacgatctcctacaatgttgttgtctagctgcagcagatggcggcgactctgcaacctgcaagcatgtcttaccataaaattacactgtcgaaaaagtgttttttttttcaaacaggagcgtctctaaaggtagattccagataactacaaattttgtggacaaagtactagacaagagaggagctgtttttttgacacaagtttgtactccctccatcgacaaatgtatgcatatagctaaaatcccataaaatatttatggacaaagggaatataattaaactatggaaaattttgttataggatatccctattgtgtggttttctcccataagctcttgtctggcattggaggcacaattgtggagtaggcaatcctgaacatggccactgaatagtaggggctgacatagttttctagatccacttctctcagggatctaatgaaagagatgtcatgtctacatgggaggcctgttagctgccattccttgcagctacattcctgtttggtcaagtccactgtgtgtctccatgttgtcaagtccatgtttgcaccactgacttcacctacaaatggcagactcttgtggcgattgtagttgagattcctacttttgtcatggagttgcttcattacatttcccaggatattgccttgcagcttgagagatagtttgtgccttgtacacatcctctccatgatcatctgcctaattttgtcaagtagctcaactacaggtagtgacttctctagcctaatccaactgttaaatgtctctgcaatgttgtttgtgacatagtcacacttagatgtggagaaggtagaccttgcccacaaatgctggtgattctcttcaatccattgcattgatcttggggaagcctccttcatgatattgaaatgcctgtcaaaaacatctttcctatatgctcttgaagctggccatagatttctttcaaatacttctccatggaaccttttctgaaaattattgtacaaatgcctcatgcactctctatgctctactccattgttgaacacccttgtcactgcagcatctatgcccttgcctgcattagtagacagtactaggccttgggagatccaattgccttatttagacaaaccatgaatcatttccagttttactttgtttcagattcaaaaacagcataggccattgggaacatccaattgtggccatctataccaatagctgaagccaactgtcatcttcacttgcctattaacacagttgaatcaatgcctagatatggcctgcacccattcaaaaatccatctatacaaggcttcaaagcaacaaacatcctactgaatctatgcttctcattaatcacatcatactctatctccactatactaccaggagatctcttcttaatctcagctttaaaactgtacactgcctcaaagctttgctcccagccaccaagtatctcatctaaagccatatgcctaccatcccacactacatagtatgacagcttgattaaatatttcttctctaaagtcttctttaaagcagcagcccctatggttggatcttctctcagcttgttgataaccttgtccttaacccaagaattgctggtcatgcaattattctccaatttgcctatgctagcacacatatgctcatatggcatcttctttatctacagtagaaaagggacagtacacaatgcatcattgtccagttgcaaaacagaaatgacaaagaagtaaaaaaactatttagctacatacctgccaagttctaccatctggcaacctagaagtatggatcctctatttgcacctctttgccttacaataagccatgtatcttgtggcctcagagtagggaactgcaagttcaacctctttcagaaacaacatattatcttatacacctcttaaaacaaagtccatcctcaaaagtaacaccaatttctatccttggattgtctacatcagttatatgaattagaggctcacaacccctattatcattgatttctaaatcatctactggatcagcattctcttcatcaccatcatcatcatcaggagtataatctggatcattagcctcatcatctgacaccagctcattgtaattctccatctcatcactaactcccacatactcaacctcatcaaactcaccccatggatctggatttggcattgattgatctgtagctttgtccctggacatgctactttttttggtgggcaccttttttatggtagcatctctggtaggtacattatcagcctgacttgcttgcgtgggtaaaaccatactcagtggaaccattgtgtcagcttcatcatccacacaaaacacaatttgggtacaaggcatgatatcctcactcactgtcacttgcaatggaagcttcttaacatcccagtattggttaaatgcctctaacaacacaacatcagaagaaatttctacatccctacccgctctcttgtcctagaaagtcattgtaagctcctgcgcactaccacggatgatttcatcatccaagtccttcatcaaatctatcaagcatactgtctttatctactacccacttatgtgtactagaaacatgataatcttggctaccgttatccatatactcaacataagcaacaaccctaaccacaactctgcatgcatagttcggatccatcctacaatgcgacggcaaatgaggagaaaaacaggcccccaaatcagatccaacaaaccatgcatcccaaacgaatcaaagagggggaaaacgaatcaaagagaggaaaaatacttatcctttgggcatccattttggcgtcgccggcgttgccgccaccacagattccaccacctcctgcgatagtgaagccatcaccgtaggtcaaccttgcattccggcggcgaaaatgcctgggcacagccagcagcgagggcggcggactggtggtgtttcgggagctagggttctaccgccggtggtggtggcgattcgatcctaaactgcaatatgaggataaggcgtaggggcatttcggtccgaccgcgtaaaaaaccgggctaccgaccgccacgtcagcacgacaagtttcatttagatggcatggtgttcatcggcaaatatccacggttatggagtgtctttccccaaggccatgtttttgtggtgtccctgggctaaaccacacaatagggatgtgttgaccactatgatataacatttaaaaaaactgtaaaccttcgaatattataatgaacagtagatttgatactttgctgctgttttcattatataatttaactcgattttgattctctgtgcattttataagttgtgatagcaaacctatagataaacattagcattactagtcaacatgagaaacccaataaaaaagtcatgaatttatgacttaggctaatatctcaattggattgatcaaatcggacaaaactgaattgaattaagggcttgttcattttatagccactttcaactctactaaaatttaacgattttggtacattttgttattacaaaattttttcgacgctggatgtgtttagtttaaaaccttaccagcatttatagaatttttcagagtgaaaacttatagaattactataatttggtaaggtagtattggcaaggaataagtctactttgcctccctccacctcatgcgtatggttgaatcgcacccctcaaccgcaaaaccaggtataacctgtcccctaacttccaaaaccattgcaaattgactcccctggtggttttggaggcggtttcgtcctacgtggcacttacgtggcaagttgacttggtctttatcccatgtgacatcgacgtggcgcttacttggcactaaaataaaaacaaacctaaataaaaataaaaagaaattttgggtccacgtggtagttactcaactcctcagtctttgtactcagcggcgagcaagatggagagagcggtggggcggagggagtagcaggacgacgggagcggagggagtagcaggacggctggagcggtggggcgacgggaactcggcgaaccacctctcctcgccaccaactcctcatccccgcctcctctcctcccttctcatcgtgttgatggcggtgttgatggtgttggtgtcagcacagttcaagacaacaggaacggcggagtggcggcatctcctccgacctcaccaccgccgcctcccctcccgtgcccctcctcagccgcctcctctccttcctccccacctcatccccgcgctctcctcctccgaccttgcggcggccaggttgatggcggtgttgatggtgttggggtcggcagctgggttgatggcggcgttggtggccttggggtcctagtcgagggcatctccgtcagccaggttgatggtggcggccggtgggtggaagaggaggtgaggtgagggcgttgggcgtgggcggcgtagaccgcatggcagtggttgcctcctcttccctcgatgagttttcaccgaccataccttacactgacatgtggggctcgcgtgctaactcggctagtcaacggagtcaaagacggcacgtaggacaaaaccgcctcccaaaccgtccaaggagtagatttggaacggttttgtgagttgtaggatgggttatacccggttttatagttgagggatgcgattcaactaggtgcatgagttgagggagaccaagtagacttattcctactggcaataatatgtttggtttgttcagaggcggagggccccatacggcacggtgggctggctgcccagctagccaccggccgggacccccacctccccatggatgtattgttctagggattttcctttttctagttgcatggcttgatgtcccaacagcatctatgcaagatccaactgagtttctgctggtgtttttttagtgttgctgatgcatgatgccttcctagtgtgttgctgctagcttgctgctgcatgatgctgcctgcatctatgttgattggttacttggttaggaaaattctattagtggcacctaattaatgtctgtgcttttctattccatcgagctaaatttaatcacttgctaaaactattgctaattgagattcaacattacaacatctgatagagagggtttcattttattcactcataatttaatcgtcggacgagggaattaaaaatattcgagtctcttagtttttggtgagcggcactttagatgataacttgattttgccttgtgacgccatcggcaggctgttaaggtgcctgtctcaagcgctccaattcataggataggtagaatactcgcaacgtagatctcctgcgtgttctagaaacaaaatagtcgcaatgctcgacaagtaaagaaataattaaacatatataattagtcaatttgattgaaggatttgaattttggatttgtaattaattattttgttgttccaatgatatctgccgaacgaggtatatccaaaatttaatggacgtttacaaaacagtcgcattgctggtaaatcaactcaataattatcactacaccacatctgttcaacttaataattaataatgattgaaactttgtggtgtgtaaggagtctgagtgtcctgtcattttcaaatttcaacccaacgttagtattaaatgaatagcctaaatttattgacttaatattgttttagagccatgattaaaatttattgacttaatattgttttagagccatgattaacttcttaacttattgacaatttagagaagcaattattagttcagaaaagaaggtcaaccatatacaataatttcaaaattaagcaaataaattaaaagaggatgataatttattagacatgtttaaggttaattttttataatctagcgaaagcactagtggtgcagtggagtcatggatacatgacttcacccaggtcataagaacacaattatgtacttttaataggaacttagtgatgtgttaagagggtgcactcatgggtgtgtgctcatcagctcatgtaagcatatgttcatcttctgtgtaagtgcgtaagaattactcctaccagatattgaagtcagtttgagatttcaattagaactgtgctcaatctataactaactagttttttcatattaggatgaaaaattagattgtgagcagagtttgaagacaagagaaaaaaagttgaacttttccgttaccagattccttatgacgagaaatttggcaaaaatttcgtccaaaacaatttcttttaaaactataacgccccctccaagtctgggttcatgcatcctaattagtcacatccccataaatctcaaatgccataccgatcaggtcatgcaccaacccgtatttctttcaaaatttctagattggcatcagtaggttctattttttgacgcaacagtaggttctatttcatcgtaaccattgtgtccacagaaatatacgtacgccgtatataccttttgcttacatccatggcaaaacacagagccagctgaccttcgctttactggcactgaatcattgaaagcaatttgcctccattttctccacgaatttccctatcagctttgtcggctactgctaccatgaacaacccaaattaaagccatatatcaatcaaactataataaccgagagagcctggtccaagatgaacagttaaatacaagctactagaccgtttcgaacatctccatcatgttaattctgtcactcgttaagtcacacgtcctcatcacgctatgaatgcaaggctcaatttttctcttctttttttttcaaaccaaatatgagtagggagattgactaggcaaattcaaaagacttcggaattcaacgtacgcgttgatatgaaccacaattgagctgaaacagtataaacagtatagtagatcatttgcattgatcaaacagtaacaaaagtacgtacgtgtcgccgcgccgcgccgcagacatgaccggaacaaagtacgtgtcgtggtgcctcgctctcctcctccgccttgcggccgtcgccggactcgccgacgacggccagttcctgtacaacggcttcgccggcgtcaacctgaccctctacggcgcggccaggatcacgccgaacggcctcctcaagctcaccaacggcacggtccagcagacgggccacgcgttctacccgccgccggtgaggctccgccgcacgccgtcgacaaagacgaacggcaccgggaacgagaaggcggtccggtccttctcgtcctctttcgtgttcggcatcgtcaccgccgacacccaggacctcggcggccacggcgtcgtcctcgtcgtggcgcccagggcgaacctcaccaccggcctcgccaacaactacatgggcctcttcaacggcaccggcagcgtcggcagcgccagcaaccacctgttcgccgtcgagctcgacaccatccagaaccccgacttccgcgacatcaacaacaaccacgtcgggatcaacatcaacgacctcgcgtcgcgcgacaacgacaaggcaggctactacgacgacgacgacggccggttccacgacatgaccctcatcagcggcgacgcaatgcaggtgtgggtggactacgacggcgacaccacgcgggtcaacgtgacgctggctccgctcggggtgcggaagccggcgaggccgctgctgtcggcgatgcacgacctctcgacggtgatcgtgggtgagtcgtacatcggcttctcgtcggcgacgggcacgctgagcacgcagcactacgtgctcggctggagcttcggcgtcgacatgccagctccggcgatcgacgcggccaagctgcccaagatgcccaaaaggaggacacggtctgatcagtccaagacaatggtgatagctctacccatactctctgtggttctcctgctgtttatggtttcctgtgttatacttgtgcggaaacggtacaaccacggtgaattgcgtgaggattgggaggttgagtttgggccgcatcggatcccctacaaggatttgcgtcgagccacggaaaggttcaagaacaagaacttgctcggtgttggagggtttgggagggtgtacaagggagtattaccaaaatctcgtttggaggtcgcggtgaagagggtgtcacatgaatcgagacagggaatgaaagagttcgttgccgaggttgtcagtattggtcgcctccggcaccggaatattgtgcagttgcttggctactgccgacttaaaaatgaattacttttggtttacgactacatgccaaatgggagtctcgacaaatatttatatggtcacaacaacatgcccgtcctcagttgggctcagaggtttctaattatcaagggcattgcgtctggtttatactatcttcatgaggaatgggagcaagttgtagtccatagagacatcaaagcaagcaatgtgctacttgatagcgagatgaatgctaggttaggtgactttggtctcgctaagctgtataaccatggcagcgatatgcaaacaacaattattgcgggtaccttaggttatctagctcctgagataactcgaaccggaaaggcatcccctctaaccgacgtgttcgcgtttggtgtattccttcttgaagttaccactggacggaaacctgtggagcgagacactgaaggaggcatacacatgttggttgatctcatatctgcgcatttggacagggagacactacccatggatatggtagatccaagacttgaaggtgagtataacactgatgaggcgagtttagtgttgaagctagggcttttgtgctcgcatccattgcccgatttaaggccgagcatgcgacaagtcatgcagtacctcgatggtcagttaccattccctgagctcgtcccgtctcacacgagcttcagcatgttatccatggcgcaaagccgaggtcttgattcatatgccatctctaagtcgttatcgtccatggcgagcataagccaactaagtagcttctcaagtgggagatgatcgacatgcattcagctagctggcccctgttgtctaactctgtttttttagtagtgtgttagcctgataggttccatttttcttttacaccgagtctctgaacatgcaatttgtttgtgttaaaacatgttcatgtagttgactatagtatagattgttcagtgatgtatgtccgtcgcagacatttgttcactgtgtatgtagattattgatgttaaactttcatagaacatgataatcagagcaagatttgtggttcagacaaattagttgattgagattgtaaatgaacccatccgattggtggtactagcttcttcatgtttgtgcttcttggaaactatgggtgcagtgcatgtctaaatatcgatttctaaatccatcagacaaccgaaatactgggactcagaaggaagagagaaacattactacatattttctttgtagttctgtatagagctaagataaatcttttatcactgttcatagttgtacatgacacatgaaaacatgtactgaaatttcagacatgtttggatggcacaatcggctccattgtaacattgtggatgataaccactgtaacatgcaaggcagtcaccccgagatggagccaaactattattttggctggttttgatacacggccttacggccatagccatgacaacatagcttcaggaaatatggcatagatcaatcaagcataagataaaatattagcagggtattctctggcacctaagaataggccatcttcaaattccatcctccttttcaacagatccatcttggagaaacaattagtaaattttagaacctgcaaaactgctcgtgcatatttggaaatgtggatcattccacataatcttctagagattccaagataagctcaagtaatcaggtttacagtttggaacctcttgtcaatagaccatatggaggatattgagagcatatcattcccaacgttcttgaactgaatatgacagatcgacagatcctccacggagcaatctaccacagacacaaagaataggcggataatgctttcctcattacaataacacaagaacgaactggcatatgatgcctattaaacatattttatctagctagtaccttctgaaactgaactgatgggattttcagattcctaacagcaggaacaaccatttggaagcccccacgtgcagcaaaatttgaactgattacaaactacagtaatttagcttccaatctgaagaatcatctgcttcagaaagagtgactaaacaatcagattcagggctttctatgagccaacacatcccaggcaaagaatgccccaagcttagatgaacaacagtccatgatcacagaaactataacatcagacttgcacagaccaaacattgcaggtttacagcaagagataggtacctaagggcaagtgaaattatgattccctaatagagtcaaatatatagcttgaaactctcaattatgtgtcttaaatcgaccatgttcacatttgcagagtaacaactgacagatgttatcttacaaaatgttaagaccttcaaagggaggctcaggtccgttggtttcctcagttttcatacatcaaacactaacatttattttacctgctcaaaaacagagatagcaacttgtctaattgagatgcactaagaaccaacatcataattcatgttatagagatccaccagatatgtgatagcagtacggctagtttatctgctctgtattagcttctttagtgtctgcatcttttatcaggtttgctagcatccccagatggttcagtgagctttgtgcggttcttcgaaagacctgtaaccccatttgctgtgtggtgttgtgtgaactactgtttttgtgggctttcttgcaaaactggatcacatttatcaaaaaagtatcagacagaagatttgatcagcaagaaagttctcaaggaccaaaccagtttctacatctacattcaaaggggtcagtaaatgacaaatcttggacatgcttaatatctgaatctccacagcgacatctatcagtggtaaaatagaaatgagcacatcttgaagcccttttgtccagctgaagcatccgacattgttttgcaacaaactcctcatagcaatctccagtgtttaccacaaatttcatagactctagcactctcgcgttcagtacaaataattgggcaaagtgaacttgtgaccagataccccgataattgtccaaaactactgtcttgagacagatgtcaatgttcttgttaagattccggtatttatgccaccagacctttttgtatcccattgacaagcctgaaaaaggacaaagaataaaaatcaaccattttggtggagcagtaataaattaatcacaagggcagcctgaaacaataaacaattggtaaagaatagttaccttgaagtataacctatccaagcaaggaaagcagcatcaagtcaataacattatccacattaagcatatccacatggatacctaaaatcttcacattgcacacaacctccgccaaactttcgtacttaactcccttcaacaagcataggccatctataagagcagacataaatttcatccacaccaacttagaagccttctaaaggggaaaaaaagagcatggttaccttaataactgtggtgccaaacgtgaacctggagtggacaaaccatggatcacaaaggcagcctacagccttcagtttaggcgcggaaattatcaaatacatgcaggtcattgcgcgattcaagatggggcaatttctcaagaagaggggcgtcctcgatgatgagttcttgtaattgaaggtgtccaatgctattacgataggatatgatgcgtgcaccgatgcttcgaaggctaggggaattgatccgaagataatggaaaccaaggttgcagttaagcagcaagcattccaggacagggcagctggcaatcatgctgtgaagtgagccctcagagacggtgacatgctcaagcccgagatgctacagatggggaaagtgtagctcttggatggtggcgtcagggagcaggcatctgccgatggtgacaacacggaggctggaagagaagcggaaggtgggtgccggcggcggcgcatctccttctctacagtagcgttcgctgatgaactctaagctccttgaggttgtcgagcgtggcggatcggagccaggcgtccacggcgtccggccggtcgacgaggtggtgcgctgggacgcacagacggcggcaggggccaggatgggtggagaggatgctggagaccacgccagcggcgagggcgtcgttcttggcgcttaggctggtagtagtgcagtcgaggttgagcgaagaggagcgccagatgtggcgccaccggcaggcgaggatctgcgtgctgccggcttctttggtggggaggcgggcgacgatgtcgccaaggatggcgtccgggaggttgctgatgtggtcggcgccttcttcgtcctcctccgccgccgccggatgctcctccgcttctccgatctcaggtggtcccgacctcctcctcctcttcgcactccgacccgacgcccccatttcgtcgagcacttgtgtttcactgcttcttcttcgctcctgttggcgcctgtggttctgtccttcgccggaggactcggcggcggcgggcggcgggcggcggcggattgcccgctccctggccgtgtgaccggtctcaacttcctgtcatggcccgtggccggcggcgtgcgatgccgaggtgaagcaggcgacgcgcgggagatgcgaattgacggcgcgagaattagggatttcgggagaaggaggagacttgaggaggggaggaggaagaatctgagaaatgatctaacagagcccagcgtcatgggcccaccaggcccagtaactgcttcatctgccgtcattgttgtcaaccgatgggaatgatgatataaaatggcccgtgctttatggtgggatatatctttgatattagagaaacgatgaaatgatttatagattaaagtattatgaaaataatttaagaatggtgatttagaaaaacggcatcattgctatggcatgaaaagagtttctggtccggatatacaaattatgcagacaaaaggccatgtcgagtgttcgtcgtgaaaaaactttgaatccaggaaacttgcagtttaaatacagtaatctagttttagaatgaaataaattgtagtatacttgcatgttgagtttttgtgtgtttaatgggttgatgtggcatgtttacatgtaggttttaggagcgctaataaatactatgcttgcatattaagttttaggtgttttatgggcattagttttatagaaggaagatatacgccccgttcttttaagatacatattttgttttatattagttttggttaacacgtcctttaaactattgtaaacggtgtattttataaaagtaattgtttatataaaagtcattctaaaatatcagataaatctattttcagtttaaaataattaaattatttccctcattttagtattttacgtgtccagatgtgatttttatggtataaacacggtattcctctggtactccctccgtcccataatataagttattttggacccaaaataacttatattatgggacggagaaagtaataatgaatttgggatggagtgtcacctaaagtttttatattacaatagctagtgcggtgtagaaaaaattggcgttaattaaattagatttgttatataactcttaactcccggcgtcccgatttgatggctcattgggaagcccttacacgggcacatggtcagtcggctgcaggcaactcgagcacgggaaggggaaaacttacacgcgaccaagcatacggcggtgacggcgggagcgttggcggtggcagcggcagaggcagaggcaccagcaatcgctgattggacacctggcaacccccccccccccccctcctccaagtctccggtccagtgcacgtttgtactggctctaatggccatgatggtgttgccaaagaagtttggattggaaaatgtgaaaacagaatacagtccagtagtccacattttgctgcgttaatttgttactgccaacagggaacttggatggggtagaatttttcccaggacttgcaagcttttatcctaaggacattgaaggctccgatttgataaaacttgagctccaacttgatacatatattgatgatatgagagaggatgatagattaaaaggcctaaacaacattgatgagctctctatattaagcttgttgaaacaaagaagcaaaagctcttgagttttgactagtattgtaatatccttgcgtcaaaaaaagtactgtaatatccaatttatctgaagactttatgtatgtttgaacaatttacatcttcatttaggtaagatttatacttatttgttattttctactacttgtattgaaccatttagagttatataccatattgtttaccacattttatatcgaatcatattgtattgcattcggatttttttttttggctaggcctaccctgggttcaaatcctgggtccgccactgatcctgtgttcatatgtgcatataattttgtatacgatagatacatattagttgaattggatttctttttaagataatagttcaattggatttaagggcatcaccaatgtatattgtaaaagtgatccatatagatgggacccacataaagaaactttaactatagccatctccacaatgtatatagatacaaggtagcattaggatatgagagagaaatagagatagatagtattatttattccatatgggtaatccatatgcttatagatacctttagttattttcttcatatggactagttgtacaatggtagtaggtagctgaatgaagtataatattgactatggactattgactataacttgtttatgtttttactttgtatacaattatataattagaaatataattagaacccgctacgatgtaacaaacaatatatttattttttttcctctgactaaaatgtttagtcttcggagcaaacgtggtggctctaattcagattcatatatccaatcctgatactaattgaaaattaatcaacatgctcctatcttctatggtcccgatctcttctattaccagccatggaggcgtagacgaacaagcgagacgttgaacactaccttttgagactaacattggatcaataattaaaaaagatgaataccccaccgcattgctgtgaaaaattaagttgcataatatatacaaataagatgtaatatgattatcaaaactaaaacaaattgatacaattttgcagcctaaaaataattgagattgcatagttttataagagaaaaggaagagacaatttgaaccatagatctattattcaaaggctagaaataattagagtgatgtggtttaacgagagaagagagtaatagatcaaaactaaaacaaattgatacaattttgagcctaaaaataattgagattgcatggttttatgagaaaagaaataagagataatttgaaccatagatctatcatccaaaggctagaaataattagcgtgatatggcttaatgagagaagagaaaaatactattaactatacttagtggggaagaactatataagtatataggattcctttatttcctgatgagccacctatatatgttttttaagatgaggtgttggatttggaaagaacggaggggaggagaagagtcatggcacttccattagggcaacctcaatgtatgttgccaaacttgatagtagtgtggggccaagagtgagaggtggtagtggtacatgatagagtccacaatgtatctgtgtaagcactagaaaataagctgggaccctcttaaagaaaagcatctattctcagcatcatgttgttggaaatttggtcataattcggtatattttaatccaaaataacaagataataaacatgatatttacaatgggatttgatccagtggtagtggtgaatgtaatcaacatgagcatgcttaacgtagaataagcatcaacaatcacataataacacaatgttgacattgcgatgaacattaacagtaaaacttttaattgaaataatgtaagaaggttataccccaagaatggtcctccgccggagtttggggcagtattgcctccgttggtgttgacgggagcctccttctctttgtctccactgttgccgttgtctccagtgttcgacatgttggtgaaggtgaagtagatgttgacgaacagtgagtagtcgtgccttgtgctccccaaaaacatgatcgcccgcccgtccgtgcaaacgtcgcagcagcgctggtttcggaggcctactctcccaacgcgtatgcacacactcgttgggatgggattaccgtagcagcaatagcattggaaaatggatgaaagtgtgtctctcttctctcgcgggagatcaaatccattatcattttataagaggaatggaagatgaagagtaagagtcatggaataggaagaggaatagagtaactaattctcatcaattagccatcaaccatcctccactacacaaccatcaaccaacaatcaattaggagtaattgatgtaagttaccaacagaataggaagagtaatagagcaactaattgtcatcaactagccatgaaccatcctccactacacaaccatcaaccatccatcaattaggactaattgatataagttaccaattccctaattccctaatcaaatggattaattctcaaaactattcatcccattgatatcccataaaagaatgaatacacatgaattcctagcataatgagccttagaatttatttgatttaattgatttaaatggatcaattacccaattaaatctaacacatgtgaccctatagtactgtatcaaaattatagtttatttcttattaccggcaatagcactatgacctggttgttgttgttgtttatcacttccacaatgcttcttactaggtagtaggggtctttttcatgtttattacctggttttttatacattgtggatgcccttagaagatctcgagaaggcatgtgggaataaaaaaacaagtcatggataactttaaccagaaaaggaatatcatcgataaaaatttcagagttaagctggaaaaaaaggggtttgcaagaattatgacactatattcttttaattttagtcacttttttccatgtgattactctctcttctctatgtataagattttatgtctcccatctcatttttcaaataggtaataaattatttttcatgtccacctaccacaccaccgttgttagggaggaagagatgatagcgcgggtttgagttgggatggaggaggaagcgcgggtgcagatggagaaatcaaagatgaacgaacaagagaaaggggggattgagttacgaatgactaaaacaaaagtatataattcaaaacaaggttatccaaatattcagaaattaatacttatttaagtgttcaaaagttatttggactgatacttcaaatataatacatgctaataggagtacatagctgagaaccttctaatattatatttacaataaatttaatacgcttggcatgttaattatttgtcatcatgataaataaaagaatgttactacacttcctaccaaatctgttcctcaagaacctatttacaatatataataacatgttataacatttattagatacgagaggttatactcatacgaacgcgcgactctgctgtctagtagatttggatggtaaagattttttccccctccaattaacgaggaaattttaaaaatcgtaaaatgttgtgagaacttctagctttatatattctagattaatttaggggctctaataaattcattcgataattaaaaatatatgatacattatattcatgttggactaaaatggccgttttgaggcctggttaatcttagccactattagcatatccaaacttgccttttgcaactgtatcttcattttcatgcgcaaacggtgttctttttaacaaaaaaaaattgtatagaaaagttgcttgaaacactcatattaatctatttttaaatttctttagataatgcttaatttgtcaaacgctaataactcgttgtgttttacatacgcgtgagagaagagatagggacgaacacagccttaaccgcataattgcatttgcatgcatggctgaccagctgaaggggagggtgggggaactgggaaaactaaagctcgggtcatggcattgcctgatctagaagaaaaggatggactgatctggtcaaatataccgtgtcaatagtgttgttcaaagggatggaattgaaacagcgatatgcatgtaattggctctgtgcgaatgtgtgttcataacaaaatatactatatatatatgcgcatggtcaaattcaagtgggtgtaccgagggtaggcataatagacataattataattaaatatagtagttcgatcctcgaaacaacctgacttagggattaggatccggtgcagtcatagtagagactacaagtttagcagttggaatcatttttcatcattagatcaagacaattaacagctgaaacaaatgctacaggtgtattaaacagtaattgctacagtacatgctacaggaactaactttgtacggtcctttgtgaacagtatttaggaaaaatctagggcgttaatttgtaatccaatggtgtcggtaggactgcttaagtcgcagtggctatagccactgcatgtgatcccctttggtcaacacctctccgaaaaaaaaaagttggtaaaaataagttgcttcgtacttcgtaatttcttaagagtgttgatactaggctctgccttagtacatatccacattttgaaataacctaattctagtgtactccatccgtttcatattataaattatttgactttatataaaaaattagaaatatttaaaatatcaaattagttttattaaatctaatattaatatatgtttataatatgtttgttttgtgttgaaaattctaatatacttttctataaacttggccaaatttaaacaagtttgtcaagaaaaaaaagtcaaatgacttataatatgaaacggagggagtagcatatcaacaacagtgttaatcttgagcggtacatgtctaaaccaagattttgtaccaaagtttctcttagaaatacaaactcttcaatcttactcatcgttctagcttcatagccatttttttatctttggtcattaatttttagaaatttatttagtttggcatcatactatttaattatagtatttatgtttttagatttattacgagaaatatctcataatatattaattaaactacatgaatttttaaaaatcaatggtcaaagcgaagtgagtatagctcaactggttaagttctttatggtggaaccagcccacccagatttaagtattagacttaacacatgtactgctcgtattattcagtggtaggcgacgtatccatcgacaatgagatatctgtagtgacttcgttaattttaagatatgtcagcttagtttttcggagaagctcgatgtatgtgtatatttatagaggtgagtgtatacccattataaacgtatgtgtttttacattgtttctaaaaagaactaatggtgaaagataccaatgtttaacttataacaaatctaccacgagacaagtaatttggaatactatcgttgctcaatgttgcagacttacagcttgaaatggacccactgtcttaagaggttgagaacggctggttttgcataaaagcccctgaatgataagctaattacacttcaattataacatatgcaaaggaggacataaaaagataaaaacaatcaagtccttccaacgaccacattggcgatggttggatcctcactcatggcaacagcaggagcagaagaaccatggttagctgcaatgtgtagagccaatgagcatatccaaagggagcctctcgacggatgttgaagtcaccttagcccataggagaaatcatcagccaccttttgcaaagctacagtcagagacgaagtagacaaccaccgtaggtgtaggagactcgcaggagatggagcaaatagtcggcgcaaccttttctttgatagcctagaggacaagtcttcaaacctaagcaaagcagcaaaactcccaactaaaggtgttggaggtaaacccatcatttcaccgggcaggaagacgatgccagcaagaacgctgatgaggtccaccatgtccgtcaagttgatacaagaagagttgaacattggcgaccctctttagctacacaaagaacgggagagacctaactagacctaaacctatctactagtggagaaaggagccgaaccccctctcctagacgccgacgactgggtggccaccggagaaggaagggaaggggccaaaagtcaaagctttttttttttgcccaagaagccgcctttcgctaggcatttcgaggtgaagagataaggactaatgccaattgattaggactttacgtcgtccacaactatcattgcacgatataatgtccacagagtgattttcaaggatcaaacctcgtcatcatgccaaaatatggagttagcttagcattttccacaattttattgccaggtatcttaaaaatcatatactattattagaattttttggggattttctatgtttaaattcgaacaatttttatcaaaccctatcgctggtagcttgggaaaccctgctttctacatgtcaacggctttgcatcccggcttcaatttttctaacttttctaaagagccctcgcctgatgatatttaaaattaaattcaggcatacatatcatcactaccatatatatgatagctgttttttttagagaaatatatattagctgttgattttttttttgctagttaacccctaatttgctagattcaatacatatatggtaatgaatctagcaaaactctacaaaattcatgtctcaatctagattttgtttacatgttaatgttcaaaactaaacagtgtttagttgcatacgaggttttaagatgatatacagtgtaatacagtgagaacattctcatgtaaaggggcctgtgggttgtttcatctgggagaagcttcaattcttcatctgttcttgtccctgggttttcattttgtccattactctgttcttatcttcacagaaatagtagtctcctactctccttttcctcacaagctagctaatgttctaaagttgcctgaaaatgacgtgtctgagctttcctcatgtggttttcaattaacagagaaagtcataagcagccctgcaggacatctgaccagattatctttgacttcactgaatttcagaatcaaacgtagcagattccttacagtttcgtgtttacacgaccaagacaatcttcactacttatccgattttttatcctcatgaaaagaattaatctttatatgataatattgggcctgtttgatttggagccaatttttggccaaaaactttagtagtgtcaaaaacttaccttgacaagttttggtattaccaaatttaataatgtagaattcaaactatgaaagaaaccaaacattgttgccaaaattttgggtgggtaaaaattggcttcaattcaaacaagcgcattgtttcaaatattgtcacatagtgaagtctaaactttctcatgaatggttctcttgggcttattcgtttcagcgtttggactgagatttctgggcggcatgcaaaacgagataagttattagtgcatgattaatagagtattaattattataaacttttttttaaaaaaagaaacatctatatagaaaattttttacatagtttatgaatttgggaagtagccatcccaaaaagctatttagaacacacccttagcaagtatagcatatttttttcaaggacatgtcagtataaaatgaaaagaaaaaaaaattccattttactcccttgacttaattcaatgtagagtactgctatacgtatgacccgttgtacgaatagagacatgtaaccatagatcaatcaaaggagagcatgttcatatacactaaaatacagtcttacatgagtcggacatttggatcatatgcatagcaatttccttcaatgtatcgcttaacctgttgtactacttttggttcatttttaccactaaaactattaaaccattgaaatggatcactttactacttattgacatttgtcttttttgttactatttatataagttgtatttaaagctgaaatttcttagacatagatagcaccattatcgaagttgaaatttgttttcatggttgtttgctttaactttaaatttttggtgtttaaatcgggcttatgcgctttcatcctacgcgaagtgagaaaaagaataaaacaatgttgatacgtaagttgtgaatgcatctgtattgtcctaaatttttaatgcgaactatgacttgtatagatgaaaaaagagagaaatagtggtaggaatgaagctgaacccttttcaatagcttcaatagctaagggtgtaaaatgaaaaaaaaatagtttagggagttatgtgctccggtgaaatagttaggaggagtaaaatgtttttttaaaaaaaaattatggccatctaaattttcagaaaacaaaagattatattattcgaagttacgatagtacggcataatgagaagtcaataggcacacgtatgcatgatattatttacctataaaaagattaatggcatatgatataacaagcactacaaatagataattaatggacatgcaggttgaaattgctgcctgagttaatgaaaccgaagctaaattgtctgcaaatcaaataactaaagtctactgtatagacggtacacaacaacttgcaagcaagaacacccaacttttctccctgaaccaaagcctggataacaggtgcatcttcacttggattcactaggcagtagccactggacgttgagttctctacaaggtcaaaccaaactaatcaaactttggcaccatttctccacaaagtttctacatcaacacttctataattgtcaggtacacccagtcctgttcagcacttgagatatttttccttagaacacattaattagagttggacgccgccccaagtgttgaattctgaaactctgaattaatctaccaggagatgagcacacacaggacctagcttttccctgcatgatgattattcaaagaaaaattccatgattccacattactatcacaccaggaatagttcaactgacaagctgcgcagctggactgaaaccttcagctcatgttcatataaaccattctggtaagtacaagctaatgagagaatacattgtccattaacactagagagaagctagctagtgagataacacagaattcagatatgcagcatatggttaagccagtttgcatattgtgtctacagtgtagcctcctctatggcgttcatcttgcagcagccgttgctgctgccggtgacggcaacggcggggaccagtttgcctactccggctttgccggagtgaaggacctaaccctcgacggcacggccatggtcacaccagatggcctactcgagctgaccaatggcaagccgcaggttaaaggccacgcattccatccgacgccgctgcgcttcgaggagttgtcgtcaccagaaggcggggagaagaaggcagcagtgcggtctttctcggcgtcctttgtgttcggcatcgtcactgcctcccctggtgtcggcggccatggcatcgccctcgtcatcaccccaaccaaggacctctcctccgggctcgccagcacatacctgggattcctcaacagatcaagcaacggcgacaacagaaatcacatcttcgcggttgagcttgataccatccagagccccgaattctccgacatcgacgacaaccacgtcggcatcgacatcaatagccttgtgtcttcaaatgcctctgatgccggctactatgatgacaacaccggtgagttcaagagtctaacactggttagtgggaaagccatgcaagtatgggtggactatgacgacgatgctacacagattgacgtgaggcttgctccggtaggaatcaagaagcccatgaagccattggtctctacgagatccaacctctcaacagtgatcaccgatgaagcatatgtgggcttctcagcgtcgataggcacaatgacctcgcaacactacgtgctcggctggagcttcggtgtgggcacgcaagctccggccattgacatggacaagcttcccaagttacctggcagaagaagcaagaagtcttatccgcccaagaccatggtgatagctctaccaatagtctcggtggtgcttgtgattgtcgttgctgctggtgtttttctactgattaagaggaagtttcagagatatgtcgaactgcgtgaagattgggagcttgagtttggagcacatagactgtcatacaaggatttgcttcaggcaacagaacggttcaagaacaagaacttgcttggaattggagggttcgggagggtgtacaaaggagtgcttcctacttctagttcggaggttgctgtgaagagggtatcacacgactcaaggcaaggaataaaggagtttgttgctgaggtagcaagcattggtcgcctccggcaccgcaacctcgtacaactgcttggttactgtcggctcaaagaagaacttcttttggtctacgactatatgccaaatggtagtctcgacaaatatttgtacagccatgatgacaagcctactctgaattgggctcaaaggttccagattataaaaggtattgcatctggcttgctttatcttcacgaggagtgggagcaaattgttatccatcgggacatcaaaccaagcaatgtgctccttgacaacgacatgaatggacggctaggtgatttcgggctcgcaaggctctacaaccgtgacaccgagctacaaacaacagttgttgcaggtacctttggttatatggcccccgaattagcactaaccgggaaggcatcccctcttaccgacgtgttcgcctttggcgcatttctccttgaggtcaccagtgggcgaaggcctgtcgagcaagacatcgaagggcatcgactcctgctgacggactgggtgtttgagaattgcagcaaggaacagatccttgctgttattgacccaagacttaacggcaacattaacattagtgaagcaagtttagtattgaagttagggctcttgtgctcgcacccaatgtctaatgtaaggccaaccatgcgacaagttgtgcagtacctcaacggagatatgcccctcccagagatgtcaccaatgcgctttactttcagcctgtcagcactcatgcagaaccaagggtttgactcgtcgttgaagagtttaggcacgattagtaatctttcaattgggagatgacaatgcaagatgatgcatttctgttcataagtagaatctgtttcttttcaccacattaggtcagagtttattgtagttattcttagctgaagtgcactctctccagccttgagttgagagatttactaatgtgcctatgcatgtttctttcttgtgacaaagtttatcaattccttgtatataaatgctgtaaggcaccgaactgcctgggctcccctctcatattgagaaccacccgcgtatgatcttgtaaaatctggagttagaggagtttaattttttgtttcttcttaattgagtgaattaatccataagaagtcagaactacaagtatagaggatatgtgcaccatcatgttgcaaacaagacttttggccccagctttgaaacttactagcagcttaactagtacgcagtgatgtgatttcacaatctcctatcctattcccatagcccctgaagtcgccgcttccacgctggtgtagttctcagtgccagcgtgtggagggtgttcagctaattcagttatccgcaaatcgatccaagatgtgagggaataaggttcaaggaactggagtatgagttctatataactctttgatcttgtgggctccctagtcccaacgatgctaatcaagactgacggcaaccggcaaatatatatattaccgtcattcctatattacatagtttgtttaaacaaaatctaaataattagagggccgagcccgttgaaacattgatatctgtccgtggtggtggaggatggtaagaatctgaggtgtgcccgggtgccgcagagaagatcaacaataaaaccgaaaacaacttcgcctaaacacaaatgcgactacatcgtttatatgacactaaatagaccaacaactaaaattaatccgcatgcaaacatgcttagattacctgttcagctcgtcaagcaatatgaaatgaacccaattgtacttccacctcttctacctgttcaccagcctcttccaccgcaacaattccattaccacaagtagttggggttggtggcacatcacccacggttaaaatagctattcaaatctgacaaacaagcgatgaatctcagtcattcaatcggttttgtaccaaataaataggattaatcggaaacatactgcccaatgtcctacctaacctaacctacctctttgagataccttccgtcgctgattttcagccaccaggaaatcagtaatcgagaaccacagctcgcttgctcagctcctcgataggctccttccaccagctcgaatgctcgatgcgacgcagacaccgagcgcacgcagccgcctcccccaccggccgccgcttgcctccaccgctccacgcgcctggctacccagtcgcagcctccccgcgcttctacggactgtggcgcccgcacccccatatgctggccgcccagcggagccctcatcagccaccccccgctggccgcccggccgccggcgggcggcggcggcggccggtcgccaacaaggcgttgccgttgcgctcgctgctggggttgggctcaatcgcacaaggagttggataaggtggtcaaggaaaaagtacactttgactccttaaagtacgctgaattgattcgtaccctttaaccagagaactagacgattcccgaactattgaaatcagtgcaatttaactctctcgtcgattttcgagggtggttttattgacatggtggtagaactaaaaattatatgtaggacccacccacttgtcattaaaaaaatattgggacgcactgacatgtgcagcccacatgtcatcctttctccctctgacccttcttcctcctccctctgcctcccttatctctctcttttcttcatggcctctgcgagctgtgtggccaacggtgacgataacggcaagtcacagcacaccgggcaggtggcgctaacccgcagccaccgctctgtgtatccgcgttgaaccgatggtccggtgcccgcacccgggcccacgccggagcgtgccgccgactcgcaagctatgaactctctctctctctctttctctccttccgttcaagtagttgccgagggtgcgaggacatccagccgttgatgaagagcgaaagaggccgctccagggcctccggcctcctcaaccgccaccatctgtttcttagtccgtagataagggagagagagggaggacaaagaagggttggagggagaaaggatgacatgtgggtcccacatgtcagtgggtcccataattttttttattgacaagtgggtctcacatatgtttttttaattctaatgccacctaagcgccacgtggaacaaagaccaggtcaatgccgccacatcagtgccatgtcagcaaaactaccctccaaaaccgctaaaggagtcaaattgcactggttttatctagttttctagttaagagatacgaattagattcggcgtacttaagggacctcaagtagactttatccggtggtcaaagctggtcaacactgccctctgggctgggccctagcctagttctgatacatccgggccatcattttgtctactgaaaggcccacaggacacggcctagtgcaatcaaactaagggggtgtttggatgggctaaaatttgttagtcctgtgtagatactaatttgcagtaataattttataaatgagactaatccgcgagtcaaattttttaagcctaaatttaatctataattaacaaatgtttactgtaacatcacataggttaatcatatattaattaggctcaattgattcgtctcacaaattagtccaaggttatggaatgtgttttttaattaatttatgtttaatactctaaattagtgtccaaacatccgatgtgacaaggactaaattttagtccctgtgaaccaaacagggcctaagcaagctgtaggccatcgctctctcacgcaaacagctcgcatgtgccagtcgaggggtctgtttattcagattctgagaaggaaaaagtacaccgaaggcaaattacaaaagcatctcctaaccacaaaaccggatacaacgcatcccctaacttacaaaaccaatgcaaactaggtccctcggtgtttttgactctggttttgaccgacgtggcagctgactcagcgttggacccacgtgggtcccacatgtcagcctctacttcccctcctctctccacctctcttcctctctctctcctcctctttccatgtcagcctctctttcccctcctctcccttcctcctctctctcacactcatctccctaggtaggtgttggtaattcttacggtcacagataaaatccgcaagcgcacgatatattaatgtagcacttcccctacagagtattccaagggtatcgaatccaagggaacgtatgtagtcagatcttcctccggttcattcaaggacaccaagcaaaggataggccaggatatagatgatttattggtgagaaacaatgtctgggaaagcttaagtttaatcctaacgtaatacttcaggcactggcaacccgttgttcccagatgtcgctctactacgtacccggacagggaggacttaagtgatctcgatagctatcaccacctctacacctacctcaaacgtactatgggatacgcagcaattattggataataatcacctaaacactacgtctaagcaattaatatctacttaagtgtttataactcactaaagtaattactatattttagtccggtatgctatttaggaactaaccaagagataattctcataagataaatctaaattactcaggaagaatattatattgaaatcagagtaataaacagaataaaatatagtacaatagagcctcttataattcagctcaaccttagaagtgtgtgagggagtgaagctccttatatagaggtaggtatgacggttgtacaacgcgaattgtcagaaatgccccgcaaccgccatcaggagatgatcagaaccgtccacgccaaaccccagcctgaacggctgagattttggttcggctgaacctgggctaggcccacctagcctggccttcggcctatctcctccccttgtcctcctctatctatttctcggagtttttggctgagtctttgatattttgatgaagttcacaacccatccttgtatggatacatgtttctcctcactttagtctagatttcctcccaacttcggggtttaatacctgcatacaaatatacaccaacactcatggaatatgtgagattaaacacctatcactatgtttgatgttttattatctgaactttatgcagatgttggcggtatagaatcggcatttaacagccgccaacaaaaccccccacacttcgctctttacttgtccctgagtaaaggttagcgtagaatgaatttctccaagatataattcaggcatataaatcattcacaaccatacctgcaccttcgaactttatcagtagctacttaccatcttgagtaattgataaatggaacgatcttgattccagtccttcttgcttctcctgtcagactcatgggattttatgaattttcgcaaaccagctcttttcctcatattgacttttatctctcaaggatatatattttcttgtggatgctcaccaagacgaagtgtgctagaactcatctctattctaaggctgatatgtggagctcggtagtgataaattgtgacatacctgcatcatatatattgcaaagccaaaaatatggactcaagaagatcatcagtcatactcctaaatcaagggtctttatttgtggtggaaaaatgggaaagtaaaatattttgtggaatgatggaataaagaaatggttctccttttttcctttactttctcctccaattttcttttcttgcatgaatatggaaggggcatggctatatgcacttttttcatcatgctcaatgttttgagagcaagctttatttctctctttatttctctctcttttcttctatagccatgcctttccctccttttctcattttctttttgccaaggatcttctaggagaagaaaacatagtctaaagtaggagttttattgaatggaatttttgtgggaagctaacttccggtgtagaagcttagcttgattaaatatgtggaaatgaaagtggaaatgaccccttgatcatgagaatatgaaagatgtctatcacgagtcacacacatttgacaaagctcaatataatgtcaagcagtcatatgcatgataaggttcatcaatgatatacttgcatatggccttggtaggtataaaatgaagtcaataggaggaatgagcctttaaaacattttttattttgaaaaacaaattcccataaatcatgacaacagtcgcgataattcctttcatctttaatcatctcacatgtagcaatcacttagatgtataaggttccctaaacatggatggttattcataagtacaagtttagctgagaataatgaatatacaagagtaatcataggaagaatttcattagttggaaattttatttttttcaattatgcttgaaccaattgtttctagaattttcagctctagtactataccatgatggagatatacagataatagacgtgcttacctgctcacctgtaaaaaatgagagggattggggccagcactgcaattttatgcagagttcagtgctttccaggtgttcagaaattcagtaattttcagagtatgtgcacgtcagaagatgggatatctcccccacacttattcgaaacctgaactttcttaaacatgaaacaaaaacaaacttggcatacattggggttaacaccaatgagccacattatttatagcaagtacttgcatgattggaaaataaatgaccaagcaaccactactactttattcatgggagaggagacatccaattagcataatactttttctccttccccatctctatgaatgcacgcttaatcttagtgcacaaaccacgactaagggtatcaaaattgtttctaagctcagtaagctctacccctagttccgcgttgcgatccctaagctctatgttctccttgcggagtttcttcacttgaacggcgagtttatggaccgagggctccggcgattttacttcatcttcttgaaactggccgggtgcccttacaattggagggggcgtcaaatgatgcttcaccttcataggtggagggctaagggactccgctgccccctccttctccgatgtcgtcaaaggccggagcaatccttttccatacccactgccgggagttcgcactcctcgaatgcaaaattgctcctccttggtagtggacggagtggcggtaggtgtggtgtatttgtggagcacctcatcccctgccttggtgaatagggtgcccacataccgctcagtgggaggcggagcggccttctcatcgtgttggaaaatacgtcgcatcttcaagagaccgagctcacccattgtcagccgttgcgtaggtgagtccccccggatttttatcttagtaacatggcgaggggagagggatcgcgctgccgaacggggccgagaagggttcggcctaaccagcgagctcgccggccggctccaaatttgctggggagccgggcaccgtcacaaggggttgtgcccacagtgcgtttacccctttcattgtatagttctccaccgggatcaattgatttgccggtgtcggctctctgtctaggttgtaggtggaattggaggatgaggcaatgtatgggatcaaggatttgccagccattggtgagttaagggtggaaattaaggaatttagttaagatggagagggagtttgcaaaggtggaggagaggaggaagaacaggtgttctgagtttgattcgttcgatctacctccgaaagcgcatcacaacaaactacaaacgagcatgggagaccacagtttgaaaatggtccctcccattgactatgcaatttcccatggccgaaaaacttaaccctggagttgaacatcaacactttgtctcctggcttgaatttcttaatttttatccttttatcataacagcacttcgtcctttctttgtatatcttagtgttgtgatatgccttttcactccattcttcaagttcagcgatttgcattttcctccattctcttgctccttcaaagtccatattccagttcctgatggcccaatatgctctatgctcgagttctacagggagtcggcatgacttcccacagactatctgataggaggacaatccaataggtgtcttgtatgctgtccggtatgcccacagtgcatccagcaatttatccttccatcctgttcccattttgttgaccgtcttctgcagaatattcttgatttgtttgtttgaagtttctgcttgaccgctggtctgtggatgataaggtgtggcgacattgtgcttggctcccatgtcttgtaggaggtctcggaaggttttgtcgatgaagtgcgaacctctgtcacttatgaccatcctaggggtaccaaaccttgggaagatgatctctgtgaacatcttcttggcatgctttgcatccgcggcgctggacggcatagcctcaacccacttggatacatagtcgactgccaccagaatgtactcgcagttgcgggatgtcacgcccggaaaatacctttccgaacgctagtgtattaatccccatcccaagaaaagccggggtacaccacaacaaacttgatacaaaaggcacatctttattaattattacaataatatttacattattacaaaggcacgttaggcctgacaacaaaaaaaaaacagcaacggacttgcgggcctacgactctatcttcacaggcactcaactggggtataagccaggactcaacctaaaactttttcttcaaaaagcttctctgactggaggggaaaagattgagcaagaatgagtacaaccaacatactcagaaagccatgctaggaaatgaattataatgcaaaggggaacaaagagttggcataaaagggttcatttttgcgtaaagccaaagttgcaatattttgatgttttgaaagcatagtttaaactcggtcatatatctaagcaatattatcacggttgcgaaaccacgcaaactgccttaaacccaggttaaccacctatccaaagtgccatgaattccatccatcacttagaagaaaaacactaacttggtacattgctaggcttgcccataaccgagggcgcggctattcgaatagttttactctgatcagtgctgtacatctttacccacaggacacaatacttgacttcatgtcagccatgcatcgtgataccgaaaaggcacctgaaaagtcaagatcatgacaagactatccacctagctcaacccaaaacagaaggacccgctaaggtttcgccgcccgccggtccccgacaaggtaaaggttgccggatcccctgagacgagacatgccccctcttgcgccaggtcaaaatcggcctcccctggccccagacctatcataccaatggcgtttgttttgagatgatctagacttctagtcaggccttatccattagacttgtggttgcactgttatgcttcgcaacataggcccgaagaccggtccttatagtggccgaggtgcttctaacaaaaccatgcacctcgcggcccaccaaaaacagatttagaaagttttgaaagagattccaccatatcatggctcaagtagccacctaatcatcattcttacatattttagttgttacccacagtctaatttataaaaagggattctatgttggatctaagcatagataagcccaacctagagcaactagtaagtccatcacatagggagccatactaatcattttatctttttactaaggttgtcaagagcatgggtagcaattcaacaacatggctatataacaaagaacattggaatattaactattaaataaacaatggtgagcacggaataatttataaaagcggtgcatatagaagtaaaacaacatagtttttgcaataatgggattcaatatgttcaaggaatatggtatgacttgccatgctcaaagagaaggtcttctgatgaattgatctacacttcgggaacttctgaaacgacagcagctacatgaacacaaaacaaggctacaaatctaaggaagagacaataacaatacataaaaacaacaaacacaagttctttaagttataacaaaaattaaacaatttaaatgggtcaattaggagctcgtatggccgagaaatgaccattcgaattttaagtgcaattaaagtagatatttctgagttgtttaattattattgttataccgttaaattatgcgcaatgtaacattgctcgagagagaaaggatcgagcaactggcaaccgggactaccacgtgagctgcacacgtgggcaatccacgcggcgaccacacggggaggacgaggagagggcagcgagggaagaggttctcaccacgggcacgacgcggcaagggaacaacaacggcgaccagcgacgaccttggcgcggcgacgacgaacgaaggagggcgacagagacgaacggatcgacgaagagaggacgactctgacgatcttcaggcttgatgaagaggcggacacgacgggtttggcgctgtggacttgacgacgacgacgacgggcgggacttcatcttgacgagaacgacgaccggaggaaggcgaggcgatggggcgacgttcctggggtcttcgggcagtgaggaggcgcggccgacgatgaagacgatgagatgaagccgccggcgctccggcgacgagggagggctgccggaggacaaggatgaagtcgaggtcaccattgcacaccagtgaggacgaatttccggctgtctccaggagaaatagaggttgggccgaggaagaggaggcggctgcgacgctagtggaggcagtggcacgttgcgatgtcgctcgatttgacggtgaacgatggcggtggcgccactagttgccgacgaggatgcactcccggcatcctctgggcgaaacggagatgaagccggggaagatgacgttactgcggatcggatggtggcgacaccgggctccgaggaggtcctgaccgccggcgaggggtggctggagttgcgcgatggcggcgacacgagaagaaggcggcgtggcagccaggtagagaagagggggagggcagcggtatgtcgggagagaggagggggtcaggaatcctttttataggcctggggggaggaggggatcggccggggagaggagagaaacggccggagagctcgccaggctgccatcaatggcggcagttgatcggagattaaattcaatgattaaaggctgaattaagaggagaaaacgtgggggaattgatgatgaggaggagaggaaccaatttttgcaatcgatttggtggagagcgagtggggaggggcggcgctggagttcttctgccgggaagaggagcggtcggctggaggtggaagacgacaacgtgtccctttcctgggccgactgggccacggccgagcgagcaggggaggaactgggccgaagcggcccaagggagagagggaaggagggtgggccggcttgaggaaaaggatgggccggaggagaggaggtcggcccgagagggaggagggacccgagagagagagggagcgaagggaagagaagtggactttgggctgaaaatggcccaaagagaagagagaattatttttagttttctcatttttaattaacgctgaaattggttgttgttgctttaaaattgtttcctgtgctctgaaaattcgagtaaaaattgaggcaccaatttagagcatggaggatttaagaaaaatactccaagccacattcgattttttttcttgtacgcattttaatgtttgccaatttaactttgaattttaattaattatattatttcttttagagaatgatttttaatttgggatggatttatcagggcgtgacacgggacttagggaaaggtcccatgaagtcaataccccaaacatcgaatatctcaacttgcaggttgtatgtgaggggcattgcatcgcaagcagtgattcctccttgcctctagcagtttgggcatcttctgacaaattcttttgaatcttcgtacattgttggctagaagaaaccacattgtcaaatcttggcatgggtgcggaatgcaccataatggccaccataaggtgaggcatggcatcgttctataatcttaagtccctcttcagtcggcacgcatcttcttagtaagccaccagagcagaccctatataggtatggctcatcccatatatgacagcggctctcatatttcagcttccattaattttctcccggtggtatgtatttggataccatgtagttcactaagttggcataccacgggttagagtcgcaaatcgtcatcaacatatcatttctcaagaaatcatttatcagttgttcctgcgtgtcagtgatttgcagcctagacaaatgatccgctacggaattttctactccctttttatccttaatttctaaatcaaattcttggagcagcaaaatccatcttaagagacgtggtttagcatctttcttagtgagcaggtactttagaacaacatgatcagtataaactatcaccttagctcccaccaagtaagatctaaacttatcgatagcaaaaacaaccgcgagcattttttttagtagttgcataattcaactgagctccggttagagttttgctagtgtagcagattgcatgatactttttgtccttgatttggcccaggaccacaccaacatcgaaatcgcttgcatcacacataatctcgaagggcagagtccaatcgggaggttgaatgattggagcagagacgagtgcctttttgagaatttcaaaggattttaggcacgcgtcatcaaactcaaagggagcatccttagctaagaggttggtcagaggtcgggtgattgtagagaagtccttgatgaaccttctataaaagccggcatgtcccaagaaactgcggatccccttaatgttcataggaggaggaagctaatctattacatcgattttggcacgatcaactttgattcatcgttcggacactcgatgaccaagaactatcccttcatagaccatgaaatggcacttttcccaattaagtacaagatccttctcttggtatcgttgtaagactttgtttaaattctgcagacaatgaccgaaggtatttccgtagacagagaaatcatccatgaagacttccataatgtcctcgatcatgtccaagaaaatagacatcatacacctttgaagggatgcaggagcgttgcacagtgcgaaggacatcctacgatacgcataggtactgtacggacatgtgaatgtagccttactttggtcctccggatggatagaaatttgatgataccaggaatacccatcaaggaaacagaaaaaggaatgatttgccagtcgttccaacatttcatcaatgaagggtgtaacagccctaaaatttgacaactttttaaaaccgaattagtttgctttggttctctaaaaatataaccgtcgagttagacatttatttaaaatattattttccaagtttgtttccggtgtttcttttctcgtttaatttttgtcgcaaagtgcatatcatccctcaaataattcctttgaatccgatttaaatctatcccaaatatcgcaccatctaaatatgacatcaattcaaattctatctattttaagtttccccaaattttccttttctctattatttttcttttctttttccctttttctctgtttttctctttcttcttcctttctctgtttttccttttctttcttcctctattcggctaggccgagccagctcgtgctgcctcgcgccaatcccgtgccacattgcgccgcgcttgcgcgcgctcgcgcccagctcgtgccagcccgcgcatcccacacgctcgcacgcacacacacgaggccgatcgacggacgaatccccggataacacctccagcttcccgccttcgtatttccttcgtctctcaactagaaggctcaagaccagaggcaaaagaagtgcaatttcaacctctttcacctcctcaaatccgcccctactcccgttaactcaatcgtcatcaccgaaggaaaaatcttctgaaattgattgagctccaaaattcgtcgcatacaacgcaaatcttctgaaattgaaggtaaaattggattcgccatgctgaatactccctttcccctctctatcatcatccaatccgttgtcggaacatcgccggcgccgcctcccgtcgccactgctctgttcggccgccgccggccacatggtgcgccgcagctccaagacgcctcagcctaagttgccgccacccctagactcccctcgccttactgatgctcaccaggccaccgccctccccggagttcgccggagtcgctgccgccatggccgcctccgcctcccgtttctgctcgccgccgccagcctcgccaccggcacttctctcaccgccgaccacaaaaacggaatcgccttggcttctagatcacaaaaccggcgcccccttgcccaaaaccggccatctccactgccggcgtcagggagttgccgaccggctcctgtgcagagaacgagaaggacaggaaatcctattttcctgttgaaaaataaatcagaaaaatcctttttcttattctatcaggttgatcatctgtttgacctcaaaatcgaaatctgatacctattccaaactcctagaattattccgaatccatccgtgttagtttcgttgcaatccgagtatccgttgttgtgaccctaattttagccatagggttcaccgttcaccgaaattccaaaaatccctaaaattatttctttaaatccttttcacccattgttgcactttaggatactatttgtttttggttatctttgtttttttgttatttattgtggtgatgattgttgcgtaaatagaaaacgccaatgttggtccgatagtcgaagcgagtgaaatctccgtgccaggaggagacggtttgtacgactacatcgagtccgaaggttgcaagacatgcaccctcccttgaacaatttaatcccagtagatagagagagttattttggtagcgtactcgtcctttggagtacgatagactgcacgaattcttttaaattaattatattactattattgcactatattttctgttgttgttataaacaccttaatgagccttggagtctaaccaacttaggataaaatttgaggaacacttaaacaaattggtaattatttagcatgctatcgatttaatatggatattattactgcatatgaaacatgcttatggaactatttatggctatatgctaagaattgttgacaccgcatgtgagcgggtggtacacacgatagagttcatgtgtttggttttatggacctgtttatggtcgtgatggatatatggatatatttatggttatttcttatttaaaattgatataataatcaaccccttgtgtcaataagaatgatatagtttcgcccatccacacgatcgagttatcgaacctagtcgtatattgctccaattgattaaacttctgcaggcctttcagtgtcctggccattagctttcaagtgtgtgaagcaaagtgacatggttcatgtttatatgatttatatatgtgggctcgatgggccccgagagttcagaattgccctatgggcccatgaagttctgggctgctcatcgagtaacgaacaatggtaagtggatgcggaggtaggttggcacacacctcggaccggatcactctgagcaacatcccgagcatccttttaacttactaggcagaagggagagagatatatggagcaatattacaccttgttacttttcagcctggccagctgtgggtatcgtgtgggtaaagctgggtagacgctgcagagtcgttgagtattcgaatacaccgtgctcccggttaatggagatgtgtctatgggtgattccagattatgggcacaagttaaacaaaatggctattaattaatatggttaacttatttattacttgatgttctattcaagttatttataagtaacatatatatttttatgctcattattattgtttaaattaaatgttcaatagtgttgtttatatcaaatgtttattaagttaggctctatgaaataattgttaaggttagggtttaaaccttccagctctcgatactacatgttttatattgcaattattgtatttattatcataagaatgtcttgttgagtaccttttgtactcataaatgggttcagatcatgaggaggaagatgcttgtgaagatcctgttgacccgttagagtgggacagctatggtttctactaggtcatcctacgctcaggcagttcctgtggtgaagtctagcagtttatctgtttgtagaaataaggctttataggccatatatgtaatggtttgtatttatgttgtgttgtgaactaagtgacttaagtattgtataatcgaagtttatgcttttatatcatttcatgcgtaactgaatatcctgggcagttacgtattcgtgggtgcaccatgactttattgggtgtccccacaaagggtagcggaaaatgatcctttttgtagccttgttaagtttcctgtaatctatgcacattctccatccagttacggttcgttgcggaataagttcattttgagcatttgcaacgaccgtcattcctcccttctttggcacaacctggaccggactaacccactcactgtatggtatggaataaataatcctggcatgcaggagtttcaggacctctttctttacaacttctcgcatcgcattattgagccgtcgttgaggttccctggagggggtactctcggggtcaatagtgatacgatgggtgcaaagcgcgggattaatccctctaagatcttgaagggaatagccaagaacagcgcgatgcttttctaacatagtcagaagacgtcgagtctcgtcttcggagagcttgtcactgattatgacaagggcttctctgtcattgtgtaagaaagcatagcgtatgccttgaggtagaggtttaagctcatgcggaggtcgaggtagtggttccaagattggaagatcgagagtctctcggggttccgcttcttccttgatgaagtcagggacttcatcttccaaaagggacttgggagactcgtgagggggaactgctgtaacctcctccgctgactcaatctctgggagagagtcgttcaaggcgaaccttgcccgcgagaatgagactgagaattcattccctcccaaagttatcttgaggctatctaaccggggcgtgtttattaggagttgctcaatgagaagcccgattagaatgtcaaaatcttgaatttcaaagacgtggaaatccaagactgcctccctatcttcaaagcagataggcacatcttgtataatcctaaatccttcaataatatttccgttcgggtgcttgaagaatttgtttatcggggttactgccttatcgctcaaataagcgaatgcaaatgactcagagatgagattaaccccgacagttggactgtaaagaataccaacatcgttcccttccagatggcaaggaatgattcgggaggggtatttatccaaattacttcggatgaaagctctgcctctcttagccattcgttgctcattatggatgttagctcccaaacagtttccctgaggaacccaagttccataggatcagtaggcgttaaggggacgagtggtttctttttactgaaatagttcagggagttgccataatcttcgtcaaaaccgtccctgaacagagttgtggcacgagccggagtctgaatttcttcattctcaacggatggctgctcaggaactttctcatcaatcaagtcagtggaagtggaaggctcagattgtgactcaattgctgaaggttcctctatcttggacacggatgcctctagctggggttcatcagattgtgccatgaagggagtattttctagaatgcgatctaaaattacttttccttccgatggtgttttgtgcatgaatgatcctccgatggttatgtccagatagaatgcagattccttatccaaacccgtatggaaatgttgcaagagtacatattcgggtatggacaaggttggtccggactgcactaaattagtgaatctcgacgaggttgcactgattgattcatttttgatttgctggaaactaaggatctctactcgaagggcagctatacgagtaactgggaagaaggcaaggcagaatctgactcgtaacttttcccaactaccatttacacatccaatggtagaggtgtaccattgcttcgctctctcttgaagggagaacagaaacaatttccaccatatagtttcttgtctcataccacaaatcttaaggcatgaacagacttgctcaaagtctcacagatgatggtagggattttctagatcaaagctagaaaaaagattttctctaatcatactgatgagttcggggcgaatttcatagccagttgtataaattggctccgatgaaggagatggctcataaaattcgcccctagagcggatagctccaagagaggttgctccatagtcgagaagagtttgacaggaatacttctctgggtagcaggggtaaaggtagaataaaaagtgaaaaagagatacgaggatgaactgggttcggaaatgatcaattaccgttccccggcaacatacatcatgaccatgttgagaccaaaagatctagtaatatgcatggctttctctggtttgatcaatacaactctatattgaggtttgtggacaacagttgtgtagggagttagtactgccgatttattatcttcaacacggtgcgaattttctaggccatagaagttccttctttagttaaagaaccaaagtatttgcttttatactgtaaaaaaagtgtcaaagtttaaagatatcaatgtaaaaaaagttctgcacaagtagaaacaatgtacacaaggtaattccaataataatcatattgatcatcacctccaagaccaaggggaagaataatgcgttttacctggaagagatgtggacaagagttatacgccatcaactgaggaaagtagttaacaatttcacattagttaaacagaatgttgcaaagatcaacaatatatcacatgatagacatattgttcagttctattggagtttggagataattaagtctgatttgatctagttgcactctgtagaatatgtgtagacaaaaaaggatggaggcaaaaaaaaaacatagcatttcaagtcttaaagcttgtgaccctagtacaaaccaccttgataaagcacattaatatgataatacttattcctcatggataaaagaattgaactcttggaaaaggactttacataaccagaaagtactaactatttttagcctcatgtttgtcaaatgcaagccatgattaattaataccatcatcaatatttgcatgtataacaccgttttctttgaggatataatgcaacatttgggggaaaaataaagataaaccttatgatgctcaagcatgtcttctcaatcaaatatttcaaaataccttctgactccattgatttcactcatgtctctggtatgctgatgcagaggtgcacatctcagtattagtgcttatacacaacttcaaaaagaaaatctaggacaaagataagtgatgtgaccatgactactacagatacaaccattgctcacataatggatgaacaagatgatataaagatcaagtcctccaagtgctagaatccgatttggccacctgctacactgctgacttcaaacggccgccaaatctgcatacgagctctgttttcgacccgtgagtacttcatggaaagctctcggagtcatttttccaacggatccagcctcattgcgaaactccatctcagtgagccgcaattgatagaacaaggtgttgcgtcacctataatgggcctatgggcttgtaacttcgtttgggaccccggcccaagtggagcccatgtggggtgcaccccaactaggtggaggacgacctcgggtccacccatctccataaatagttagattccccttcagggtttcttgggttttgtttagattaaagtttagctttgctactttgccgggtaatcccgtgatcggttagatcgccggtttgctcgttatagaaccccaaacttatcatttgtactcaattcctatttgcaatttagattgcttttatcttgttcttgcatgtttcttcgatttgcttgcaggaataaggttgatctgcactggcaagatcaacaacccacggagaggtgtaccgatcgctaaggcgcaacacaacaacgtctcgtacggttgtagtcaggtcgtcaacgtttctcccaaatcgtagttaacttcaactcaccgaaagatcgggccaacaacagccttgagtgtcccgagtggaactcagggttcatcaggtggtatcaaagctttcgttgctcggtgagtttttttttatttacctatatcgagaaaaattgccctacaaaaaaaattgcatcctgtacctagccatatttgtgccattgcattgttcttttctatttttgcgttgttgagttttgtgttgcatcgtcatgtcgtgttgctggtcatagcgtctagtgcgtttagagtttcgagttctggtcacattttataccacagtcgtcgcgtgcttgttgttgtcgggacctacgaaaacggaatcgtctttccgtcacggttctatttttgtagttttcacaagtttttgttggtcggttttggagttgcgtgtaggttttatgttgtatggcgtgttgttctgccaggtcccgtggccgtgctgttgcgcgtgaaaaaaaaagggaagggggcgtctgtttggtagattagattagatcggtttctgttgagattgatttttgtttcctttcatgcgagatatccaaactttcagccgagacagtcggtttcccatctatccgactccctccctgtcggtttcaatgcatactgtgagatgctagacagcttggtaaaaatttttagagtgtcggattggagatctgtttgcaaaacggaacctatgggacgagagcatttcatttttgtatagttctaattttgggtttggacttttacagttgagtccctataaattttcatatttatatttgagtccctataatcttgcattgaggtccttttgtcggttttgataaaaaaaatcaaaaaaacggaaggaagagaaaaaaaggcagaaaggtgcataaaaaaagaaaagaaaagccgcaccaaaaaaataaaagaaaaagaaaagaaaggaaaaaaaagaaggaaaagagaagaatcagttgtatctttgagattactttcatatatcagagtgtgcttgagttagttctagtgctatcttgtggtatcgttcgtgtctaggctcgcatctttagtacgttctagcctaggaccagcacagtacttgactttgaacaattattcaactttgcattatctgatttgaaccattgcttttctttgctacatatttaaacctacctagagctccacagatctgattgcaaccaaacagcaagtgtttgccaaggcatcgatacatccaaactccattggggtgcttggttgagtcggtgtatgtcactattccgcttgctttggtaagaacttgtaagagcttggtgaaaagattgagtgtgtgtgatatttcagctgccactacctagtagttgataggagcatgcatattcttgtgtatgtttcttgtttgctactaaccatggcaggattgtgcaaggggaaacgagatggtcatgctcaacatctacttcttcaccatcaatgagatatatcgtcttcttctctctttgcatataaggtacatgataatgatcttgcaagggtagaatctaatttgcctgtttttgatggtaattatgattccgccgcttatggtaattgggagctagcagtagacaaacaatttgatgagtatgatttctctaatgctcaaatgattaaggctgctagtaataagtgtaccggttctgcatctttttggtggtatacttttggcaataagcttgaaacttgggatgaatgcaaaacaatgatgaggaaaaattttgtgttttcatattataaacgtactctccttgagaaattagaacatctaaaacaaggtgataaagccgtgtgggagtactttcatgactttaaaatttgtaccacttatagtggtttaaaagaaagcaatgagagcacaatgactagattttttagagggcttaattctgatattcagactgggcttattaacgtgacatataatcatataggccacttgttcatgcttgcttgtagtgttgagagcaatattttaaagaacccaagggagaaacaatctatgcttgtgcctcctattactgacattttgcagggagctcagaacattcaccatgaggagaagagcaatatgatcgagatgccatctccatcgctcacgaaggaagaagagaagactgatgcacctacattatctgaagagggcatagaaggtaaattaaatggtgctgttattactcaaggtggtgtgcttttgatgagtcacatttgaccactatccatactaatctagagcaaattttggtggaaactacttctgatttgcctttgtcacaagttgatttacttgttgttccctgtgataaagaagagttgtgtgataatgcttcacttatatcactgccacaactagtgaatgaacatgctatttctagtgtttcattgtgtgctgattttaagcatgttgttcacattgctaatgatgttgaggaacataaattgataacttctttaaatacttttggctatgttcagtttgatgatttttgtgagctcaataatttggaggataaattatttgctaagtatgattttccatgtccaactaatgctatttttcatatctttggcgtatataatgatagaggaatatatttggtgcatagagttttcatttgttcggatttagagaaacatgttattgctaatcacacaacttcgagtttctctagttttgattggatgaaacaagttattttgaatagactatggccctgtttgtttcagcttaagattattgtaatctagattattaagccagattactataagttagattataataaaccgacatggaataagctgttaactgtttgtttctttggattattagttgtatgttagctgttagccacccaataatctagaaaaagcacctttagagtggattaccatattatagtaatctagcttatagattgtaataatctatcgtaataagctatctgtttgtttcagcttactcctaataatccaaattataataatcctaagctgaatcaaacagggcctatgtgacgagcaccatacggaaaaaccgagaacggttttccgtgaagaaggggaggatgatgtgaccatggctactacagatacaaccattgctcacatcatggatggacaagatgatataaggatcaagtcctccaagagctggaatccgattcggctacctgctacactgctgacttcaaacggccgccaaatctgcatacgagctccgttttcggcccgtgagtactttatagaaatctctcggagtcctccttccaacggatctatcctcattgcgaaattccatctcagtgagctacaattgatagaacaaggtgatgcatcacctgtaatgggcctatgggcttgtaacttcgtttgggaccccggcccaagtgaggcccatgtggggtgcgccccaaccaggtggaggacgaccttgggtcctcccatctccataaatagttaggttccccttcagggtttcttgggttttgtttagattaaagtttagctttgctactttaccgggtaatcccgtgaacggttaaatcgtcgttttgctcattacggaacaccaaacttatcatttgtactcaattgctatttgcaatttagattgcttttatcttgttcttgtttgtttcttcgatttgcttgcaagaataaggttgatctgcaccggcaagatcaacaacccacggagaggtgtatcgatcgctaaggcgcaacacaacaacgtctcgtacggttgtagtcgggtcgtcaacgtttctcccaaatcgtagttatcttcaactcacggaaagatcgggccaactacagccttgagtatcccgagtgaaacttagggttcatcattaagtatgcatcatgagttaaaaaacctatctccttctaatggcagctgctaagagaacttcttgaaagggtcaaataggcctagagggggggtgaataggctaatttaaaactttatacggaagctaaaactgaaataaggtcggaaagtctgatccacagtcagactatccaaaaatatcagatagtctgatgttggatcagactgtctgatccaccaatgaagcacaacaagtagatctatcacacaaacaagagtaaagcacaaacagcgactagatctatagcggcacaattaagcaaagctaaaaggaggatgaagggagatcaccaatgatgaagttcacgaagttgttcctggagttcaaatccttgaggggattctactctccgttgaggagctcactaagagccgggtctttgctaaccctttcctcaagaggttgcactaagcactcctccttccactaaggggtatctctttccttgcggaggcgagatccagccttcacaaacttctcccggccaaccacacgtagatcggtggctcgggagtgacacctagccgtctaggagtcctcaacctccaagagtaacaaacaccacacaactcttagtcaaaccctagtgctcaagatcgagtgaaacacacactaggccctcaaacaccaaatccacaaccaccaagatccaccacacaaagaacgaggagggatttgagagagggagaaagagctcaaagatccaaagcacctaaacaccaagctcaacccaaagtgaatgagaatgaaatgagttgggtaaccctagaaaagggttaggtggggggtatttatagaagcccccaaaatgtggccgttgggagagaatcttttcatgccacctcggaaagtccgagatgacatcggatagtccgatgtttttgacccccaagcaggccagagacagagaacaaaattctggagaatttcggacaatctgatcgatcggatagtccgatgtcatatcggatattccgttatttttgaaccaagaatttcatcctctcacagagactcaagttccattgaatttcggagtctctggatcatcgaatactccgattacatcggatagtctgatttaaaactcactcaaaaggaataaaaagcaattcaaaacagagagtgaagttttgagaaatttcagatagtccgacgtatcggatagtccgaccttatatcggacagtccgatattttttagccaacactcagacccaagacagtgagcaaagttctgtgaaatttcggatagtctgagcatcggatagtctgatcaacatcggatagtccgacagatataaaacaggaacacttcaaataaatgattttgagcactagtgttctaccaattatatgcatgtggcatccctcttaatagtacgacatcctaatactcaagaacacaagatatacatggattagaagacaattaccacaaaagatgtcgcaatacttattgtgttgacatccactcctttttcatccttgcatacatctcaacaaaaagcattagttaccatctaattgtgttgtcattaacaccaaaataaatgaggggtcctagatgcactttcaatctccccctttttggtgattgatgacaacatacttagaagtaataaaagattaggattttggtggagatccgcctaaaagtgtgcattaaagcaagtagagagctccccctaaatctttgcatccacattgaagctcacaagacaacaaatatatcacattttgctcatcacattcatcacatctacaaatatatcacattacatcccaagcattcataattaaacaataatgacttacaaagcattaaactaacttaagaaacacacatgtctcatacaaataagaaccactcatgttcgaccataataaataaaaggatagatcttctccccctttggcatctaagcaccaaaaagggaggatttttgctggaattttgatgaaaacattttgcaaacttttggaaatgaattttttaagggaattgcaccgggaattttgaagagattcaatttttcacaaacttttgatgggagttggagagaaaggaatggtcgaacatttaggccccatttgagttcatggctagcacacaatcaaccacacaaaacaatagccacaagtcaaatggatgatccaaagatcaaaggagagtgaattatcatgagacaagatatccccgtacacatagattcaagctatccacttagattatgactagtgttcattcatgaattgaatgatcactttgtcatgatgtggcatgcaatcttattctagtaattgaaaacaaatgcatgcaaaagatcaagccacattccgagaatccaagatatttagttcacttctcaactcacaaaacctagcttcatctagaggcttggtgaagatatccgccaattgtttgtcggttctcacatgttggatgtctatgtcgcctcttgtggaatggtctctcaagaaatggtggcgaatatctatatgtttggttcgggaatgttgtacgggattattggctatcttaatggcgctctcattgtcgcataggagtaggattttggacacattgaggccatagtctctcaaggtttgcttcatccaaagaagttgagcacaacaactccccgccgaaatgtattccgcttcggcggtggatagggcgacggagttttgcttcttggaagaccaagaaacaagggacctacccaagaattggcaagtacccgatgtgcttttcctatccactttgcacccggcataatccgcatcagcataacaaatgagatcaaacctcgctcccttaggataccaaagaccaagattagatgtgtgcactaaatatctaagaattctcttcacggccacaaggtgacactccttcggagcggcttgaaatcttgcacacatgcacacactaagcataatatcgggcctagatgcacaaaggtaaaggagtgagccaatgatggaacggtataccttttggtcgacgtctttaccttgctcgttgaggtcgaggtggccatttgatggcatgggagtgtggattggcttcgcattctccattccaaacttcttgagcatgtccttcaaatactttgtttggcaaatgaaggttccttccttgagttgcttgatttgaaggccgaggaaaaactttaattcacccatcatggacatctcaaaacatttggtcatcatcctactaaactcttcactaaaagacttgttagtagaaccaaatataatgtcatcgacatatatttggcacacaaaaatatcattatcatgtcttttagtaaaaagagttgaatcggctttcccgatctcaaagccgtttttcacaagaaaattgtgaaaacactcataccaagctctaggggcttgcttaagcccgtagagtgccttgtggagcttgtacacgtggttgggatacttcggatcctcgaagcccggtggttgctccacgtataccaactcgttgatgggcccgttgaggaaggcgcttttaacatccatttgatatagcttaaaattgaggttagtagcaaaagcaagcaatatgcgaattgactcaagtctagctaccggcgcaaaagtttcaccaaaatctaatccttcgatttgggtgaacccttgcgccactaacctcgccttgttccttattacgaccccggcctcatcttgcttattgcgaaagatccactttgtgccaatcacattttgccgaggtcgctccaccaaagtccacacttcattctgggtgaaattgttcaactcctcttgcatcgccatcacccaatctggatcattaagagcttcttccacccttagaggttcaatagaagacacaaacgagtaatgctcacaaaaatttgcaatacgagaacgagtggatactcccttgttgatgtctcctaagatgttgtcggtggggtgatctcgttggatactttggtggattcttgggtgagctagatttatcggagagggtggcacttgctcgccttcttcaccttgatccaagcttgaagtggagggattgtcggcttgggttgatgtaggtggctccacttgtgttgaggaagaggccccttgttgtggctccctaggacgcacgtctccaagagccaatcttttgattgcttcgctagggtcctcctcttcacctaacacatgtgagtcaacttgctctacttgagagccattagtttcgtcaaatgtcacatcacgcgcgatctcaacaatattggaggttttgttgaaaacgcggtatgcgcattcatttgacccatacccaagcaagaacccctcatcaactttaggagcaaactttgaggacctagccttcttattaagaatgtcgcacttactaccgaaaacacgaaagtaagagacatttggtttgttaccggtaagaagctcatcgggagtcttcttaagaaggcggtgaagatagaggcggttaatggcgtggcatgcggtgttgacggcttcggcccaaaaacagtccgatgtcttgtactcatccaacatggtcctcgccatctcgatgagagtcctattcttcctctcggctactccattttgttgaggtgaatatggagccgagaactcgtgcttgatgccttcttcatcaaggaaactctcgatgcacatgttcttgaactccttgccgttgtcgcttcgaatgttcttgatcttgaggtcgaactcattttgggctctttttgcaaacttcttgaagattgcttgtgtctcactcttgtcatgcaagaagaacacccacgtgaagcgtgaaaagtcatcaacaataacgagaccatatttgttacctccaatgcttagataagcaattggcccgaagaggtccatgtgtagaagttccaacggtcttgtagttgtcattacgttcttgaccgggtgatgagctccaatttgttttccggcttgacacgcgctacacaccctatctttctcaaaaagtacatttgttagacaaggatgtgatcgtgctttagaagcttgtgaagattcctcataccaacatgggctagcctccgatgccaaagccaccccatgtcggacttagccactaagcatgtctcatgtttggctttagttgaggaaaaatccacaagataaagcttgcccttgagaacacccttaaagactaccgaggagtcatcccttctaaatacggtcacatcaacatcggtaaaaagacaattatagcccatggaacataattgagaaacggacaagagattatagtttagagattttaccaaaaggacgttagaaatggaaagatcattggagattgcaatcttacccaatcccattacttttccctttccattgtccccaaagactatgttctcttgcgaagtgccatttagatcaagggagcaaaacattgattcttctccggtcatgtgatttgtgcatccactatcaatcacccaacttcttccaccggagagagattcctacaagagatcaatttctagttttaggtacccacacttgcttgggtcctctcatgttagtgacaagtgccttaggcacccaaagaactctcttaatggaaacatttttgcccctcgggcctacatacttagcaacaacacgaccactagcattcttcctaagaacataagatgcatcaaaagaacaatgtgaagcataatcattaggaaggatacttttggccttaataaaattgctaagaccttggggcctcttgatcatcacactcttgtccacctttccttttggtggaggaacatacccaagaccctcatggttgaagttgtccctttgatagcctaggtactcctttagggccttactacccatatggcacttaagtagtgccattgtgaaagagtcacataagcttctcattttgcttttgcaaagcactcaaagaaatagagttagtagcacaagcttcaatatcaatatttttgcatctcacacatgattcattgcttgggacaattttggaacaagacggctcactagggagagagacactattctttaaggtttcgaacttttcttcaagagagaggtatgctttgtccaagccatccactctctcttgaagttgagcgttcgccacctcaagattagcatgagactctttggtttgcttgtagagccgtaccaaagcctcatttttctctctctccttagcaagctcactcttgagttcatgagatcgctttttctcacgaatgagcaaagcctcttgcctctcaagagttgcatattggtcctcaagtctcccaagcaactcactcaagtgtggtatagattccttggttatggatttgaacaactcgtcatccataacctcatcctcaacatcttcctcctcatcactaacaagatcaacattaaatgagttgaggggagagggtaccttagactcctttgccatgaggcaaatgggagcgtcctcatcacttgagtagttgaagaatctcggtggtgatgaaggcttgacggcgaacgtggcaactccttcttcatcacttgagcttgactcggagtcggagccgaagatcatcccaaggtgagcttggccatagcgatcatgcttgctatgcttgtgcttctccttcttctcaagcttcttgtcttccttgaagtggaggcaatccttgatgtgggggcaatccgcaatgaagtgcctgggctctttgcacacatagcacacccttgcggagtgtcttccacttgacttgttggaggaatacttggacgaacttcccttgaagaagccgctttgcttcatgaacttgccgaacttcttcacgaagagagccatctcttcatcatcgatctccgccttgctcttgctcttgcgactctcttcttcttcttccttcgccttcaatgccaagtcttccttcttgatgcttgtgattgaggtttggttgatgtattggatgacctccttggactcttgctcgagcatgtcatgggcaaggatacgcccgagcaagtcatgaggtgtgagagttttgtagtccggacgctcacgaatgatggtcaccaaggtagagttccttggagtgattgcccgaaccatcttcttgaccacaacctcatcggtcatgtccttggagccaagtcccttgatctcattaacgatcttgctcaatcgatcatacatgtcgcttggactctcaccatccaacatcacaaaccgctcaaattgccccttgagaatctccaccttggactcgcgaacactatccgtgccttcatgcaaattccgaagcgtgtcccaaatcactttggcactctcaatgccgtccacacggttgaactcacttccactcaaggcgctaagaattgcattagcggcttgagcgttcttgtgctcgttctcgtcgtcctctttggtgggttcctcgggattctgcaaaacatagcctttttcgactattctccaaatcaaagggttaatagatttcaaatgcatcttcatcttatgtttccaagtggcatagtccgtatcattgaagtacggagctttgccgctataggtgctcacataagatgtagatgtggagggatagtcataaggaaacgtagctcccttatcaccatccttgccattccccgtttgacccgacatgatctctccaagcggttaagcctaattaggagattaggctctgatacctattgaaagggtcaattaggcctagagggagggtgaatatgctaatttaaaactttatgcggaagctaaaactgaaataaggtcggaaaatctgatccacagtcagactatccaaaaatatcagacagtctgatgttggatcagaatgtctgatccaccaatgaagcacaacaagtagatctatcacacaaacaagagtaaagcacaaacagcgactagatctatagcggcacaattaagcaaagctaaaagaaggatgaagggagatcaccaatgatgaagttcacgaagttgttctcggagttcaaatccttgaggggattttactctccgttgaggagctcactaagagccgggtctttgctaaccctttcctcaagaggctgcactaagcactcctctttccactaaggggtatctctttccttgcggaggcgagatccggccttcacaaacttctcccggccaaccacacgtagatcggtggctcgggactgacacctagccgtttaggagtcctcaacctccaagagtaacaaacaccacacaactcttggtcaaaccctagtgctcaagatcgagtgaaacacacactaagccctcaaacaccaaatccacaaccaccaagatccaccacacaaagaacgaggagggatttaagagagggagaaagagctcaaagatccaaagcaccttagcaccaagctcaacccaaagtgaatgagaatgaaatgagttgggtaaccctagaaaagggttaggtggggggtatttatagaagcccccaaaatgtggccgttgggagagaatctttttatcccacctcggaaagtccgaggtgacattggatagtctgatgtttttgacccccaagcaggccagagacagagaacgaaattctggagaatttcggacaatccgatcgatcggatagtccgatgtcatatcggatattccgttatttttgaaccaagaatttcatcctctcacagagactcaagttccattgaatttcggagtctctgaatcatcggatactccgatcacatcggatagtctgatttaaaactcattcaaaaggaataaaaagcaattcaaaacagagagtgaagttctgagaaatttcagatagtccaacatatcggatagtccgaccttatatcggatagtccgatattttttagccaacactcagacccaagacagtgagcaaagttctgtgaaatttcggatagtctgagcatcggatagtctgatcaacatcggatagtctgacagacataaaataggaacacttcaaataaatgattttgagcactagtgttctaccaattatatgcatgtggcatccctcttaatagtacggcatcctaatactcaagaacacaagatatacatggattagaagacaattaccacaaaagatgccgcaatacttattgtgttgacatccactcctttttcatccttgcatacatctcaacaaaaagcattagttaccctctaattgtgttgtcattaacaccaaaataaatgaggggtcctagatgcactttcacttctccttttctaattgtagagaaaccatctgttcaaactgctatcaaaagatggcagctgcttagagaaattatattttctaattgtagagaaaccatcaaactgccatcaaacattacaggtgctagcaatattacacgaattttgaaaccccgacaataatacatcccttggtattctctatccccctaaattgtagtttaactagatgctagctttgtactgatccaccctatgtgtttatagagaatcaagcatgcatggatccaggaaaaggaagcaggagatgcaacaagtccaacatgcaggaataaagcatatgaaactcctcgtggactgacaggcagctaggcagaagaaatcatacctatatccttaattttgtccactaaaatgcgatcaatagcacaacaagagggaaatgaacaaagctccggaactcacatctcatctctccctttcccttaattttaaagcaattatatcaagcaccaacagaagcagcacacgcacctttcaatgcagtgatgcaaaccaacagaaacacatcacatgtcacaataagctaacaaattctaacagcgaacaataatacaagcttcagcgaaactcgaagatactttgaccttaagcgcgtccagatcagaatcatcagatcgaaccttccataattcctcatgcacagaaataaaataattccagtcgaataagccgaactgggctaatcgggagacagttcaccaactccaaccgagagagatcacggagagagagagagagagagaatgacgttgagcaccttgatggacgcggcaacgatggctgtcggcaccggtttcccgtgcgggaaccaccacggcgccggcgggggcaggccgtggtgcaatgcggcggcggcaggaacaagagatgagggcgcagagcgaggaggcgcgccgcgaggagttgcgcggggggcggagcgaatagcgcgtggggacgggaggagggagcgattggcggatcgaggaggcacgcggcacgtaatagcgcgggggcggagcgattaccgcatagggccgggagggagcaattagcgcgtggccccacggggacgggctcgcaggtacgcgagtgcgggcggtggagagcatagggtctgactccaatgagatgcggatgaacggatgagattagaggaggtcatttggcctgtaggattggagggtacaacttctactttttatattagtatagatatacattgtgagaccacacaataaactaataagttataagctcatgtgccatgaacatctcaaggttaaagataaaactagtatgtctttgttgttgaattaattctatatagagaattagaaatgcagctcatgcatgcaaggaaagtagattggttaggcattgttttccacccaatctcagttgatcttttgaggtgttggatattgattgtataatcaacatgtgtccacactttttacaaattatactaacacatctacttccactctccctcaccccatctccatgcatgcacgtcttgtctgcaaggaccacaccccatccccagcctcctatctccacatcaaaaccccgtgactcctccctatttgatccccaaccatcattctccacatacacctatattcctcctccccatccgtttcttcattgtccccgtcgtttcacggtgcgtgccttctctctactcctcttcatcgctcactcctcccacctgtagggctcttgtttgttacccctctccatggctcttgtatgatcttgatcatagaacatgaaaagtatctacacaagtcacaacgatttgacaaagttcaatggaattacaattaaccaaaatgtatacggcttaatccactcacggtgactcgactttactgtagagaggaccaattctacactttttagatgttttggcccataatattgaagcccaaataataggtatatataaaacctaaccctagtcaatcagttaaaactccaaatcctccactccttcagatcgggcgctcggcggcagtggctgcgctgcacgcgtgcaccgccactccgccagcggccagccactgggcacgccgccgctccagacggccaagttgtggatgcaccgccccagccatcgtcatcgcgccgccgggagccgccgttgtcacgccgcccggcacctgcagccgtcgacgcgggcgcggcacctgccgccgtcgtcctgccgtccatccaccatccgccgccagcgcccttcgtcgccactcgctagaacaccatctgcagccaacggcctccgttgttgaagaaatcaactactgaagtgctgattcgtgttgagttgatttgttttgtttaaccggggacggtggaaccacagggataaattcaccgcgtggtgatcggggctggagaaaatatagccccgtcatggttgacgagggcggggacggggacatgtgaccccctctaaaccgcatgcatggctgaccagaccagctgagggggagggtggcaactggggaaactaatactagcaagcaggcacagtcggaagcagcattccaaagctcatcgggtcatggcattgcctgatctagaagaaaaggatggactgatctggtcaaatatacagtcaatagtgttgtgttgttcaaagggatggaattgaaacagcgatatatatgcatgtaattggcgctgtgcgaaagtgtgttcataacaaaatatactatatatacgtggtcaaattcaagtgggtgtagcgagggtaggaacgacagacataattcagtatatagtagttccatcctcaaagcaacctgacttagtgacttgagggcagagcgttgcgtatagctagctagctcggttggcacactagtttgagcaggtgccgatcaaacacctctccggaaataaaaaattgggtaaaagtatgttgcttctttctttgagagtgttgatactaggctctgccttagtatatatacatatgtatccacattttgaaataacctaattctagtgtattccctccattttatattgtaagactttctagcattacccatattcatatagatgtaaatgaatctagacacatatatatgcttagattcattaacatctatgtgaatatggacaatgctaaaaagtcttatattctgaaacggatgaagtagcatattaagaaaatagtgttcatcttgagcggtgtacatgtctaaaccaagattttatacccaaatttctctgagaaaaataaaatccttcgattagttttcaaaatacttaccattctagcttcatagccaattttttttatctttggtcattaatttttagaaatctatttagtttggcatcatactatttatgtttttagattcaatatgagaaatatctcataatatatgaattatataaattaaactacatgaatttttaaaaatcaatggtcaaagcgaagtgagtgtatctcaactggccaagtttcttatggtaaaattagcctacctgaattcaagtcctatacttgatacagatgctcgctttattcagtggtaggcggcgtatattgggtttatcttgttgcatgtattgtacttaagagaataggttgataggttagatcatgcatgtagtgatcagtgttcctggagtttgcacgagcaatatatgtggaagcagtggatcaaaacgcctctgaacgtgtgagacgcggccggtgattttgagatggagtgtacatggcgagagggccgaggtgtcgtgtgagacggcaaaaatgtatgcgtgtgtggcatgtgtggcaacagtacatgagtttagcagctggttaattagtaacttagtatagttagttgcatcatggatagatcgatgcacgttctggttgttagctggcgtgtaggcgtacatgcagccttgccgagggttagcttgttagtgcatgcaggtgagtgattacctggtcattaggtagatcgtgctgtgagtgggtcttgctgaagtgcccgcttgtgtggctatctgtctgtctgtctgtctgtctgtctgtctgtctatatgtatgtatgtatgtatatatgtatacatgtatgtgtgtatgtactgcgcgtcagtttactttaatttaacaagagaaaaaagagacgtgagctgtaatagctgcgtcaccaaatattgcttctcttgtcttgttctttgtgtgcgcctatcaaacaaagcttaagtgtttgggttagtgagtatatagcaccagatagagggagagattcccaacaacgtatccaccaacaacaagacattcgcagtgatatgttggcttagcttttcgaaggagctcatatgggtaattaagatgtatgtgtgtatttataggggtgagcgtgcgtccgttataaacgtctttgtgtttgtgctatatgtttctaaaaagaattaatggtgaaaaagataccaatgcttaacttataacaaatctaccacgacaagtaatatggaatactatcgtaactcaatgttgcagactttgcagcttgaaatggacccactgtcttaagcattggcgtgcctcttggctcttgctatatatgtgcagtggctgcacgtaagaatgtctcacatctttaaccagaggcttgtctttctaccacggtttcatcttcaaagatttgaattcaaaatttttcaatctcaatggtaaggtcatggttaccaccgtaaccacggtaagggttgataaccacagtctctaacttgaggaaaagaggatcacgaaaaaaaaagaaaaacataacttcacatttgacaacaatagaaatgctataatataatgtccaaaactatgtttttttcaaaaaaagaaactcatatgttttattgattaaggacaaattacatgatttacattccctagcgtggtaaaaccgtaaagctaagagaatggctggttttacataaaagcccctgaatgataagcaaattacacttcaaacataacatatgcgaaggagaacctaaaaagaagataaaaaaacaatcaggttcttgcaacgaccacatcggcgatggttggatcctcacgcacggcaacagcaggagcagaagaaccatggttagctgcaatgtgtagagccaaggagcatgtccaaatggggcttttcgatggaggttgaagtcttggcccataggagaaatcatcagccaccttttgtaaagctaccgttggagacgaggttgacgaccatcgtaggtgccagagactcataggagatggagcaaataactagcgcaaacttttcttcgatagtctaaaggacaggtcttcaaccctaaacaaaacagcaaaattcccaactgaagacatgttggaggtaaacccaacctcaccggtaagaagacgatgccagcaagaacgctaacgatgtccatcatatgtctgtcaagctgagacaagaagagtcgaacgtcggcggccctctttagctacataaagaacgggagaaacccgtctaaatcttaacctatctactagtggagaaaggagccggaccgtctcacctgaacaccgacgaccgggaggctgccggagaaggaacggaaggggctaggagttgaagcttttttttttccgcccaagacaccgtctttcgctagggcctttgaggcgaaaagataaggactaatgccaatggatttggactttacgtcgtccacaactaccatttcacggtataatgtccactgacttcgtcatcatgccaaaatatggagttagcttagcatttccacaaaattttattaccaggtatcattaaaaatcatatactattataaggaattttttgggatttttctatgttttaaattcgaacaatttttgtccattactctgttcttatcttcacagaaaaagtagcctcctttcctcacaagttaagttgcctgaaaacgacgtatcggagctctcctcatgtggttttcaattaactgagaaagtcataagcagccctgcaggacatctgaccagattatctttgacttcactgaatttcagaatcaaacgttgcagattccctacagtttcgtgtaagaaattcttcactacttatcccattttttatcctcttgaaaagaattaatctttacatgataatattgggctcgtttgatctggagccaatttttgccctactaaaattttaatagtgccaaaaacttgccttggcaagttttagtattaccaaatttaataatatagaatctaaactatggtagaaactaaacattgttgccaaaattttgggtgggtaaaaattggcttcaatctaaagaaacgcattgtttcaaatattgccacataggccgagtttagttccaaactatttcttcaaattttcaacttttccatcacatcaaaactttcgtacacacataaacttctaacttttccgtcacatcgtttcaatttcaaccaaacttctaattttggtgtgaactaaacacacccatagtgaagtctaaactttgtcacgaatggttcttttgggcttattcgtttcagcatttggactgagattgccaggcggcacgcgaaatgagataaattattagtgcatgattaatagaatattaattattataaactttattttaaagaaaatatatatattttttgttttacacgaaacacaccatttatgaatttaggaagtagccatctcaaaaggctatttagaacacacccttagcaagtatagcatatttttttagtaaatttcacaaaaatatagaaactatgatcaaattatcacaaaactacatatttaactcggtgtatgacaaaactacacatttaacaccaaatttatcacaaacctacacatttaagatgaagtgtcatgaaactatatgtttagtaactaaattaacacaaaactatatgtttagaaacaatttagttacaaagcaataatgtttatagcttcaccgtaacaatggtgctaagaatttaaactccaaaagttgtagttttgtgataacttcaatattaaatatgcatttttgtgatgctttaccttaaatctgcagttttatgataaatttggtgctaaatttagagttttgagatacaatgtcttaaatatgtggttttgtgataatttggtcaaaatacttatagttttgtgaaatttactcttctttttcaaggacatgtcagtataaaatgaaaagaaaaaactccattttactccctcgacttaattcaatgtatcacttaacccgttgaaatatttttggttcatttttacctctcttaaactattaaactattgaaaatagatcactttactacttaataacatttgtcttttttgttactatttatacaagttgtatttggcgctgaaatttcttagggacatatagcaccattatcaaagttgaaaaatatttttttttcatggttgtttgattaaaatttaaaattttggtgtttaaatcgggcttaagcgctttcatcctatgcaaagtgagaaaaaaaattaaaacaatgttgagaggtaagttgtgaatgcatttgtattctccagaatttttaatgaaaactatggcaaatgcatttgtatagagaaaaaaaaagaaagagagaaatagctgtagggatgaagtgaaccgtattcaatagttaagggtgtaaaatgaaaaaaaaaaatagtttcgcggttaagtgctccggtgaaatagtttggatgagtaaaatggatttttttaaaaaaaaataaaatttatgggcacctaaattttcagaaaacaaaagattatattattcgaagttacaatggtacagcatagggagaagtcaataggcacacttatgcatgatattatttacctataaaaagattaatgccatataacacgcactacaaatagataattaatggacatataagttgaaattgttgcctgagttaatgaaaccgaagctaaaatgtctgcaaatcaaataataaaagtatactgcatagacggtacacaacaaacttgcaaacaagaacacccaactattctccctgaaccagagcctggataacaggtgcatcttcacttggattcactagccactggacgttgagttctctacaaggtaaaccaaactaatcaaactttggcaccatttgtccacaaagtttctacatcaacacttctataattgtcaggtacactcagtcctgttcagcacttgagatattttttcttagaacacattaattagagttggacgctgccacaagtgttgaattctgaaactctgaattaatctaccaggagatgagcacacacaggacctagcttttccctgcatgatgattattcaaagaaaaattccatgattccacattactatcacaccaggaatagttcaactgacaagctgcgcagctggactgcaaccttcatataaactattctggtaagtacaagctgatgagaatactttgtccattaacactagagagaagctagctagtgaaatcacacagaattcagatatgcagcaaatggctaagccagtttgcatattatgtctacagtgtagcctcctctatggcgttaatcttgcagccgttgctgctgccggtgacggcaacagcggcaaccagtttgcctactccggctttgctggagtgaaggacctcaccctcgacggcacggccatggtcacgccggatggcctactcgagctgaccaatggcaagccacaggttaaaggccatgcgttccatccgacgccgctgcgcttcggggagtcgtcgtccccagaaggcggggagaagaaggcagcagtgcggtctttctcggcgtcctttgtgttcggcatcatcactgcctcccccggcgtcggtagccatggcatcgccctggtcatcaccccaaccaaggacctctcctccgggctcgccagtacatacctgggattcctcaacagatcaagcaacggtgacgacagaaatcacatcttcgcggttgagcttgacaccatcgagaaccctgaattctccgacatcaacggcaaccatgtcggcatcgacatcaatagccttgtgtcttcaaatgcctctgatgccggctactatgatgacaacaccggtgagttcaagagtctaacactgattagcgggaaagccatgcaagtatgggtggactacaacgacgatgctacacagatcgacgtgaggcttgcttcggtaggaatcaagaagccgttcaagccattggtctctacgagattcaacctctcagcagtgatcaccgatgaagcatatgtgggcttctcagcgtcgataggcacaatgacctcgcaacactacgtgctcggctggagcttcggtgttggcacacaagctccggccattgacatggataagcttcccaggttacctggcactggcagaagaagcaagaagtcttatcggcccaagaccatagtgatagctctaccaatagtctcagtggtgcttgtaattgctgttgctgctggtgtttttctactgatcaagaggaagtttcagagatatgtcgaattgcgtgaagattgggagcttgagtttggagcacatagactgtcatacaaggatttgcttcaggcaacagaacggttcaataacaagaacttgcttggaattggagggttcgggagggtgtacaaaggagtgctccctacttctagttcggaggttgcagtgaagagggtatcacacgactcaaggcaagggataaaggagtttgttgctgaggttgcaagcattggtcgcctccggcaccgtaatctcgtacaactgtttggttactgtcggctcaaaaaagaacttcttttggtctacgactatatgccaaatggtagtctcgacaaatatctgtacagccatgatgacaagcctactctgaattgggctcaaaggttccagattataaagggtattgcatctggcttgctttatcttcatgaggagtgggagcaaattgttatccatcgggacatcaaaccaagtaatgtgctccttgacaacgacatgaatggacggctaggcgactttgggctcgctaggctctacaaccgtgacactgagctgcaaaccacagttgttgcaggtacctttggttacatggcccctgaattagcactaactggcaaggcatcccctcttacagacgtgttcgccttcggcgcatttctccttgaggtcaccagtgggcgaaggcctgttgagcaagacatcgaagggcatccactcctgctgacagactgggtgtttgagcattgcagcaatgaacagattcttgccgttattgacccaagacttaacggcaacattaacattagtgaagcaagtttagtattgaagttagggctcttgtgctcgcacccaatgtctaatgtaaggccaaccatgcgacaagttgtgcagtacctcaacggagacatgcccctcccagagatgtcaccaatgcactttactttcagcctgtcagcactcatgcagaaccaagggttcgactcgtcatcgaagagtttaggcacgattagtactctttcaattgggagatgacaatgcaagatgacgcacttttgttcatagatagaatctgtttcttttcaccacattaggtcagagtttcttgtagttattcttagctgaagtgcactatctccagccttgagttgagagatttactaatgtgcctatgcatgtttctttcttgtgacaaagtttatcaattccttgtatataaatgctgtaaggcaccgaaccgcctgggctcccctcccatattgagaaccacccgtgtatgatcattgtaaaatctggagttagaggagtttaattttgtgttttttcttaattgagtgaattaatccataggaaatcagaactacaagtatggaggatatttgcaccatcacgctgcaccaactactacaagacttttggccccagctttgaaatttactagctgcttaactagtacgcagtgatgtgatttcacaatctcctatcctattccatagcccctgaagtcgccgcttccacggtagtgtagttctcagtgccagcgtgtggagggtgttcagctaattcagttatccacaattgatccaagatgtgagggaataaggttcaaggaactggagtatgagttctatatatttttctcttggatcttgtgaactccctagtcccacgatgctaattaagactgacagcaaccggcaaatatatatatattaccgttcattcgtatataatatagtttgtttaaacaaatctaaataattagagggacgagcccgttgaaacattgatatctgttcgtggtggtggaggatggtaagaatctgaggtgtgcccagttgctgaagagaagatcaacactaaaaccgaaaacaacttcgcctaaacacaaatgcgattacatcgtttatatgacactaaatagaccaacaactaaaattaatcgacatccaaacatgcttagattacctcttccgctcgtccagcaatatgaaatgaacccaattgtacttccacgaccccttctacctgttcagcgcagcctcttccaccgcaacaattccattgccacaagtagttggggttggtggcacatcacccacggttaaaatagctattcaaatctgacaaacaagcgatgaatcttagtcatccaatcggttttgaaccaaataaataggattaatcggaaacataatgcccaatgtcctacctaacctaacctacctctttgagataccttccgtcgctgattttcagccaccaggaaatcagtaatcgggaaccacagctcgcttgctcagctcctcgataggctccttccaccagctcgaatgctcgatgcgacgcagacaccgagcgcacgcagccgcctcccccaccggccgccgcttgcctccaccgctccacgcgcctggcttacccagtcgcagccttcccgcgcttctacggactgcggcccccgcaccccgcatatgctggccgcccagcggagccctcattagccaccccccgctggccgcccggccgccggcgggcggcggcggccagtcgccaacaaggccgttgccgttgcgctcgctgctggggtttggctcaatcgcacaaggagttgggtaaggtggtcaaagctggtcaacactgccctctgggctgggccctagcctagttctgatacatccgggccaccattttttctactgaaaggccacaggacacgccccagtgcaaccaacctaagcaaagctgtaggccatcgctccttctctcccagtcgatgggcctatttattaagatttttgagaacgattttgctatatctcactcgaaagattttttcttatctctcactcgattttctcactcaaatttacagtgcattttcttgtaagttatagtgtaatttatgaaacttacactgtaacttttgtaagttacactgtaatttttgaatcttcacatgtaaattttaaattttgtatttgatttggtctttttcttgaggatatggtaatttaatgttcattatggtgtttcttaattgctttttgctttttattatatctatcggattttaatacaaagattaaaaatctgtgtgatacgattataaaaatctttcgaaagatgtataggtactcccatttgagaaatacggagtagttagttgtcgtttgattatttttctaatcaaacttatttaattttgccaagtttataaaaaaatataataatattttaacacaaaacaaacatattatcaaaatatattcaatttagatttaataaaactaattttatattttagatgttgctaattttttctataaaatcggtcaacttaacaaagtttaactagaaaaaaatcaaacgacttataatatgaaacggtgggagtagttagcttttgaaacagtttttagcttctatttaattttattataagacatctaggctgccattggatggcctaatgagccaaagaaaaagccaaattttaaattttcaagtttaattttgagattgattttgagatattttcaacgtagtttctttttcaacattggcttttaagtcaccaagaacatatttataaaaagttttatctacaaatttatttttatttcctaataagccgttttggcttattaggaattaagccaaacgatggggacctaaaatttatgtaatttgttgatatacatcataaaaacatgtcacggctgaaagacacactaaaatgctggtaatttactagaggatactttcgattcaattggagatatagattcacatgcttctaacatgacgttagagtgaaattttagaaattaaacaactttaaatttgttattgccccaagtacatcattagcatacatcatattccattttcactctaatcttagctcaaaaagtttttgaccctaggggtattcttgtctttttgaagaaagtgtcctttggcaaattattaatttttttgattatctttcagtcatgacatgttttttatgtctatcagttaattacataaatttttagtatattgtagtaaattttgatttctttttggatttaacaagtgcagcttatcaaaatctgaacgagaaactaatttgtttcaaaaagtttttgattttaaaagaagctacatctgctatgctaggaaacctctaaataacctcatggctgattggcaacgtaattacgctgcgaacgagggtcagctagctagaggaagagtacaattaaattaaaaatcttgtgtaacctccaagccaagttaagttagcggcccggtaggcgctcatgggtgcatgtcatatcctcctgcctactgtactcaccaccggattctcggggtccagctaagctgctagctctctgtgattgcggctagacttgcagcgaccagcaagtgttgttctcgcaaatgatttcggctgggtcgtcagtgtgtacgtccacctgcacgtgacctccctcgatagactttttttttcttttttgaagtttcttgactttttaaaaaatatcaagactaaagacaatgctccgtgcaaactgcggagtcgtagcgacaagtgccgcacagtgcagggatatgtacagagtttgcataaacagagtcacgcaacttgggggactacaaattgagcctcagtagatagcatgcgggatttttgttgccacacacacacacaccaccctggccaaaatcttgcacccccaaagtttgatttacaagtggaaaatcaaattagcgtacatgtgccttctctggtttagtagtgtaacatgtctcagggcctcatcgtttggcttttttcgtaataagccaaaacagcttattagagaataaaaataaatttgtaggtaaaaattttatatatgtgttctcggtgacttaaaagccaatgctgaaaaagaaactacgttgaaaatatctcaaaatcaacatcaaaattaagtttaaaaatttaaattttggctttttctttagctgaatagaccattcgatgggagccttaaaaacaagacctgttcagtttactgctaaaattaacctattgccaaatttttggtaagttagcataattgtcaaattttggtcggatggaataaatatattgtgctaaagtttactatgcattaccaatatttaataacaaactaaatacaatcatatatttatcaattttactaaacaatggtatacttagaaatggcaccaatctaaatagtcccaaaacttttcatagataaccattttcatcacgggttattttgtactcccttcgttagggaaatacccttcatttctaatcttaatttgaccattttatctattctattcaaaatcaagaatttttctctattcaatatcctttatctatttactccgtgacttctactcggtgatactatttactccatccgtccctaaaaaatgaatatagaaccagatgtgacatatgtatgtagattttttatgggatggagagagtaatggttaatgaaggataatttaatttttttatcgccacttatttgttgccgaatagctagaaaagtctttttatgagagtcggggcagaccaacgctagaatcgaacatatgcaaacaggtcgaactacggaccgtttatttggtttacaactatatacccgaaataaactagcaagtgatcagaacactactatacaacttttttagttgaacaatatgggtcaaatgagcacctatcagtgaaaagacttatattcgaaagtagtagaactcataaaaaagaaaatgtgatttttgttgtacagaacgctttcaatgccaatagataaaatatgcacacagcacacttgctgagcacagctgagtactagtgagtagtaactgtctaccgaccttccactctagaggtcgggcccacatgcagtgacccaccagtttaggttagctaggatccgcgtgcgccgcgcggtcccccgcgagaggcagcacccgcccggccacgtcgttaaagccgcgccacctgattcaccgcaagctcccgcgtcaattactactgctgctctactgcactacatcctccctcctcttcgatttcccggatcatctctttcagccgatgtgatcggatcccctccaccccgcgcgcgccatgggcaagaagcacgccgccgccggcagcggcggcgggtggctcgccgccgtcaggaaggtcttccgcccctccaaggacgccgccgacaaggtagcaatggcggtcgcgtgcgtggttctcatcgttcttgatcgtatcgatcacggtcacggttcgtgtgagtcactctcgatcgtgtctcgtgcgtgcgttgcagaagggtggcggcggcggcgatagggaggaggaggcggcggcggaggctgcgccggaggtccttctgctggagcatttcccggcgggcgggacgtcgccgtcggcggaggggacgggcaatgatcagggcggcacggtggtggggaaaggggagggtgaggaggaggacggcgaggacgggtacggcgaggtggagcgcgcgagggcgctggcggcagcggcggaggcggcggtggcggcggccgaggccgcggcgagggtggtgaggatgtcggcgctccggcgcgcgtcgcgggaggagcgcgccgccgtgcgcatccaggcattctaccgcggctacctggtacgtacgtatacgcgcgcctagcaaaccaaacctgaaaaaaatcatgctctgtttatcaggataattttgtgcaaacatgcttttactatatttatcttttctaaaataatcgtgtgcatatttgcatccacatcaaatcgtcaactacacaaaaactatatggtaataatttattgttaaaaatgttaccgaagatatggattgttttagaaaagataataatttattgttaaaaatgttaccgaagatatggattgttaaaaatgttaccgaagatatggattgtttctgtttcacaatatttattcattaatttgagccattatttcacattatttagtgagcgtgtgtatagggggctcacttcactcgcaagtagtgtgggcgtgcagagtagagtttgtgtttgtgcgccactcacgtaaaaacaaccgtatgactaaaatcgaaacagcagttattgaaacattttgacctgcagagaggtggtagttagttatagcatttaaaagaggcatctactgtcgttttgtcccaactatttgctggggtgagatcttggcaagtgtacatgtttttgtttatagtaacaagttaactgtaaaaagtttgaaaacgaacagagtaccagttggattactgatagaacatttccccgcaaaataaataaataattaaaacgaaggactgccagtagaacataactttcacaatcaaaacaccaccaacacattaagtcttttgcgccagacaaaaattccgaagggaagtacacaagaaatcaaaagaaaaatcataatcaagaattgagaggcaaaaaaggtggtgagtgtgtgctcaagttggtggcaagatctcgtgttagaatcagtgggggcacttttaaggtgatcagtcttaactcatctagcttaaaacctacaagcgaggtatcaggatcgcttacaccgcaaggagtgactgattagatagatcttagggaccagggggaagaggtgacttggggacaaaacatgaatcaattattacatgttttctcagcttggggtaattcaaaatgtttgacaccgttgactttttagtatatgtttgaccgttcgtcttattaaaaaaatttatgaaatatgtaaaactatatgtatacatgaaattatatttaacaatgaatcaaatgatatgaaaagaattaataattacttaaattttttgaataagacgaatggtcaaacgcgtacttaaaaagtcaacagtgttaaacattttaaaacggatggagtatattacatgaatcagcacggctttaacgcagttacagagactacttctcctacctgtgattattgatcattggtcgtctcatatgcatatccatccaccttgcttgattggcacctaccatatcagaccatccaggacggatagtaactgcgtttcatgtccggatgccaaacaactgggtactacttgacagtttcaacgttggaccattgtgtattgcttttttgtgtgcagtttagtgcttgtcttctagtgtaaccgcaacaaatcgtgtgctgtaagtcccatgattacagaggaaatcatgcattccggtcaaccatattagcccaaatctagtgcttaagccactaaacattccttgttttctttattttacgcaaattggttacacacaatatttgttaagattatgactcgtttggaaaaacacaaggcactgcttgattataatttcagtttgaattttagaatttgattctaaaactaatttttggcaggccgggttttcttcgccaattttattagcaagctctatttttatgactaaacaatattcctaaataatttttaaagaaatcaaatttcaaaattttgcctttttctagtcaaagtagtgacaagcacagcctgtatatttttgttgaattaattattaaactcttttgaaaaaccctcctttaaaaagacatttttaaatatttattataatacttcacaaataaaccctagcctagcaaaaagaacgaacaaatgagcacacaaacctcaaatggggagatatttttggggatgtagcctaacttgaatgtggttcaaattgggcctcgaaacatagtatttcaccgatgattgggataagcaagagagagggatagcaggttggtctaggaaacacctagtacacgctcagttacacgggcgcccctgcacggtgggtttccccctctggtctctcctctgtatacgaactttgtatacatatgatacaaattttatacgtatgtattcaaagtatatgcatacgtgtatatataaagtttatatagtatttgtttacaaactttgtatatagacttatacaacttttatatgtatataaattgacacgtatatgtatactttttgacatataaatatttttattaatatgcgtgtacaaaattggtatatacatataaagtttgagtttgtatgtatacatatacggaatgttcgtatggtacatttgtcgtgcgggaagacacgcgtatgcctagtcactaattagtgattttggttggtctagtcaagtacgcaggaaagggagagaggagagaaggaacgaagcaggagccgaccccgagccttattagggcatgtacaaaattagagtcagatgtgagctctatcacctagaaattattctcttacaacatttgaggcaatatggtatctaaccattaatgtacgaaaataattttttctttctcttctttcctttctttcaaccccgtgcaacaaaatatttcctaataaatgttaagagtcgactttgagatgtcatgtgtaaccatgtttctctttcctgttctttctttctttcatgttaccaaatttacttgcatggtaatttatagaactcactaataaaaatcgttgtacatgcccttggcctctgccatattagatagattggagcaatcctaacacgccatttaccttatgtggtcccatatcctctgctatcatgacatcctttgccatgctacatgcgcattggccacattgaaaataacaacttgattgaaacatagtgtagtatatttttaaatttttataataaaaaggttttaaaaagttctccagaggtcttaggctgagttcttctcttctagttaccaactcccttcgattgaggtctataggaaagttactctaaaaatgatattaatctatttttaagttttgtaggtaatacttaataaatctcgtgttaattatttgctttgttttccgcgtggcaggaggctaaggttgcttgtcttcgaactcaggccccgtttagtcacaaaatttttttcccaaaaacatcacatcgaatctttagacatatgcagggagcattaaatatagataaaaacataaactaattgcacagttagggaggaaatcgcgagacgaatcttttaagcctaattagtccatgattagctataagtgctacagtaacccacatgtgctaatgacggattaattagtctcaaaagattcgtctcgcggtttctaggcgagttatgaaattagttttctcattcgtatccaaaacccccttccgacatccggttaaacgtccgatgtgacacccaaaaattttcttttccctaactaaacaggccctcagccttatggtaaattcagatattgacagctcttgccaataaaatctcaattgtttcatttagtcagttgatagtttgaagacacaatcatcaaaatgtgccaagctaatttttcaaagagttttgcacaaatttagttttgaatgtgtatcattttcctttttattttcttatcaaggaaaagaaaataaacagtgtctctgatgttgacgtggcaggcgcgtcgagccctgcgcgcgctccgcgggctggtgcggctgcaggcgctggtgcgcggtcaccaggtgcggcgccaggtccacctcaccatgcgctgcatgcaggcgctcgtccgcgcccaggcccgcgtccgcgcccgccgcctcatcaccgaccacatccacgccggcgtcgccccgctccgcctcccgccccttcctcccgccaccgccgccgccacctacagctcccggcgacgggaaggcggatactcgtggcatcctctccgcaacaattcgtaccacgctcagctcggcgagcgagacgagagcgacgacgacgtcgacggcgacggcggcaaggttggcgagcacgcgcggcagcagcagcagcggcaacgaggcaacgacgtcaggagcaggagccctttccggagctgggacggcagcagccgcaccccggaggaagacagggccgagggcgtgcgccggcacgacgccgccgctcgccgcgagcgcgcgcgcgcctacgcctacggctaccagcaggtgcgcgctcccacgcctaccgtggatgtctcgactactagtacttgacgagcaacgttttactgaccatgatctagcagagacaatggcaggagaaggccggcggcttccaatggctggacagatggatggcagcgcaagcgcagcagcacgcgccggagcccgacaagagccgccgcagagccgccctgacggccgccgccgacggcaccaccatgcccgagaggacggtcgagatggacacgacgtcgtaccggagcccgctcaactcgcactccgccgccgtgcagggccggccgccggctgtcccaggttacatggcggcgacgcaggcggcgcgcgccagggcgcgcacggcgccgccggccaccccggcgcacgccaggagccggtccggcgccgttctcgccggggacacgtcgagctcggggcagagcggcagcggcagcggcggcggcggcgcgcatgtacaaaaaccgtgcgcggtgtacagcccggaatcgagaggcaccggcgactggacgccgccacggctcgccgtcagcagccgcgccaccaggttggtgtacgcttgattcggcgtggcgcgcccatccgcgaaacacaaaatctgatgggatcgtcagggttgtaacttgtgctttgtgtacttcccaaaccatggcagattttggattgctttcttgttgttataccaatgtatagcttgctgtgtgtggcaaatgtctgaagatcgtgtaaaagttttgaatgttctgaaaaaaaaaacaattggggcacaataaagttaagagccattctctgttcaagttctccgagtagattttagcatacatttgttgttttgaatttggtacttgtaattgctgcttgtttgttattgccaaagctttctttgttcaacttctggatttaccagtttatatgtgcaactgatgtggcaaaatgaacaaaaaagattgctcccattagggtaaaaaattgagggaccatagtccttttgccatgacaaaatgaactgtccttttttcttctaattgttatgtgaaatcagtggaaaaggaatttttcattgcaaaaatgtatgctccatttatgttttggacaacacacatcctcaatagattgcaggcaattttctctcccacattaataaaaggagagataaattaccaaacaattcctagaaggaccaacctgtaattttaaccctgtacaacaaataccatacaaatcagaactcttcaaatccacactttcccgaagaatgaatggccttatattgcaattattcgctgactaatttctatgccgcagtaaattcttagttaccgagaatctctgtgctgctgcaaaattcagaaatggaactgaagacgtcgaaaagagccttgaaaataaaaatcccttgtttgactataagctggtagctgatactctcacaggcttcaaaactcttagtaccctcctagcatgctcaagaataatataaaatactccaaagaagaaaagcaaaatgagttgcaacttcccaagtagattgtatataacgatgatgttgcattctcgtttagcaagacgactatctgatccagcaagaagtagatctggtttttgacagaacaccacaaattatttgaagaaaaataatccaaatatttcaaaaattatgtgtaattttaaaacgcaattaccatcagacttcttaggaaggtttgaccattccccctgatctgtatttgattttgatgcttttatcatctccatgagggacatattaacctgcaaggtagtttgtcagttggaatgcaactattgttgcatagtactgaacattgaagtcaacaaatatcaaatctaggttaaaaaaacaaatattaaatccgtaaaaaaatgatgcgtttacctcagctgttctttcgtggctcaccaggtggcctccatggagttcaaccagtttagcagcaggctggagcttctctgctagtctccttgcatgatacaactgagctacaacatcatccctgatgaaataccatcatacagatgatcagtacagtgatgagataacaccagtctaaagtgaattattaaggctactaatcaccttccgtgtataactagaataagaaaacctgatgaacgaatccggtctagttctttctgtgtaagcttatgcgtccaacatgcattcagttgtccttcatatccatgtcttgattgcattccacatgatgacaaacctttcacatattcctgtaaaaaacagtaacgcttccttgatcagatgaaacaagtatccacatgatatttgtagattgttttaatttgaaattcagattgtttcagattttttttacttggcaaataaagaatagtttcagtttcatcataattaaatctagctagagcataggaaagatcaacatttccaattttgtcagtgaaccttcctagtctaacaaatgtgagtcaaagtccatttttctccctattatggatgttacatttgtcatataaatgatctgcaattgcttacctggtaaagcatttgtcttctggtatttgatccaacaatttcatcgaggtactcctacagtatgacaaaagctgtaaattattctctttcttttttagcattcaaataaggaaaacttgcacaagaatattcatttatactaaccctcgtgtaatgaacatcaagatcaacaccagctctctgctctggagttcttgctcttagaaaacgacatgcgagggatatggtctgccaatcaatctggaccgaaaaatgcaacggacattaggaccaggctactttattttattttattttttgctaaaaaatacatgttagtgcaataagcgaaatgtcataaattaaataactgttattcaccaagaccatatatactttgacaatgtcaagataagactgcattctactgaacaacttgtttgaaggcttcaacgtgagttctgttttgaacaacatggatagtttataaatacaagcactggacatacaaaatgtcaaacccataaattaaaagagccccaaattgatttgacattgttcattgcaaaaattataaacattgtacactttaatttgcagatatttattattatggacatggacacggtgacaacgcatggtgaaaaagaagaactattgtacgttagtacgtgaatggtgtaaaattgtcaaaatatccattgctttcacaaattgagtgtacatactactagaaagggaggtctcaatcatgctgcaaaatatccttttcttcctcccaaaaccagtaactacagattcaaaagtacggaagaaatttgtttgtatatagtggacatatcttcattttaattctagtacaaatttaacgtggcaacaataaactccggtctttggcaaagaccgcgccaatattgactcttcctctctgagctacatatcagctggcagatttttcgtttcatcattgtcaaatcatatttaattttctaatcaattgaaagaccatccagaaaccagagaatttaaagtaaggaaagcaacagctgaaaccttcaagtgccaaagttgaaaaaaatatccccttgtgattgtgactcaagtctcgaataaagcctagcccttctttttctctgaaccagtgaaaagaaacagaaaaaaaagcacacaaggattgacaggatcagagtaccttggggatacattggtagccacctccggtggtgttgagcaacgccagcgaagcgacacgctccggcgcaatggcggccaacttggaagctatcatggaccctgcttcaccatgatccccataattagttccaatctctgaatctgaagttctgaaccctcaaaaattgcagacagggtcatctgaaaacagagtatgcatgtcttacccatggagtgaccgaaaacgtgtgctttccgccaccctagatgatccattaatgctagcgcgtccttcgccatgatcaccgtgctgcgaagaatcgagcagatgaaatgattttatttggatatttgatgttgggagaagattagaaagaactcgactagtatctctgtctctgtcagagaattcaatgggtggtaaagagcagagcattacgtgtactgcgatttgtgcggcggcacggagctccggccaatgccgcggttgtcgaagcagcagacctcggcgccctccccggcggcgccatcgtcgccggcgggggactcctcgtcgacgggctcgacggcgcccgtcaggcccttcacctgcgggccccacgactcgtgcgtccccgcgaaccctgcgccaacgcgtcgacgtgacgagagattaaaatcttcgtttttctttttttggtttttaaaatcattagaggaacaggtaaaaagcgcgtaggaaaatatcagctcgcggattcgaaaattgattagtgaagcatctcgtggaggtggagagcacgaagcaaaagcaaattccccacaagagggggaaaagaaaaatcccaatctccatgaaactgtggtcggcgactcgccggacgcccaaattaacatggcgaggatcaagatatgacccacgaggccacgacgacggcgatggccggccgccgtgtcgccattacagggagaggcggagctcgaagagagggagagaacaaaagaaaaaaaagcgtggggggaggaggacgacggcgtggacacacggcacgtacgtaccgatgatgaggagcaccttggtgccgccatggccgtatctctggtagaaaatccgcacatctccctcctcgccggccgccgccgccgccgccgatgggtcgccgtggctgaccacgcagtacggcatcctccctatcgcgtgccggagggcgccgtcacgggctcgcggcggcacacacacaaccaaggttttttccctcccttttgggccttggttgcttcgcccgccggccgccgatcggtcgccccaagatgtgcaattcgccgaccaaccagccaaccaaccggacacgcgggtacaaattggttagtatttgtaggtaggaaggagtactagtactagtttttactggcaacatttgaccacttgtcttattcaatttttttttaaattattaattattttatttgtgacttactttattatctacagtactttaagcataactttttattttttatatttgcaaaaaaaaatttaaataaaatgagtggttaaacgttacaagcaaaaactgaaaatcccttatatatatcgtcggatcggagggagtagtagctagcgacgtggcggcctcgatcggatggcgcgaaacggttcggattgggagggacacggagcggcgcgatccaacgcgggggtgggtgggcacgagcagagcaggtgagttgacaagaagacgcggcgggggagcttttttgttgtcgagtcaaacaggacacgatccggaagtttgactgaccgggggtttggtttgaaaagatgaccctttccgattacatacagcgtgcacacgtaccagacttgccctgggtcgcaacccatctcgatcgcattccgcacgtacgctttttaaattgctaaacggtttattttttataaaatatttctatgcgaaagttatttaaaaaaaacatattgatctatttttttaaaaaatattaactaatacttaattaatcacgtgctaatggaccgctccgtgtttcgtgcgcatggtacgtgttaggaagaccagctgccgaacacagccataggctacaatgaaatacaatataaattatcacatcacatttgtatttatgtgaaggagaaatgagatgggagagaaaaaaattaggttacaaatttgtagtatgttgtagcccgagatccattatattactctttttattctaaaatataatagattttggtcaaaagtttatagtattaggatatacatcgaaccaacatcttttatagtttgggatggaggaagcatgtgagatagatggtggattaagtattaatgatgtataactagctattgtatgagtggactatcggtttactacaggtgatgttttaatttttaaagctagtaattggctatagttaaacttgctttaacattaaaccactacacacgtattaaaatacacacttaaaaaagatagaaactagcgacatatacctgttctcattaaatctacatgtttgtgtttaacacacatttcttaggcaactactaatatttatattgtgtaggaccttactaacatttttaatgtaagtgtgaggataagaatgtggatttaggcagaaaatacttctctgaatggttaataaacacatttttttaaaaaatgttccttatagatgatcctataaaaaatcaaataaatatatttctaaagtttataataaataatatttaatttagcatatgttgatgagttgctttgttttgcaagctgcaataagctaagccctaacatccatgtgaaaatatgtttcttgaaaacccatagttttatcacatgatcaactgttaagaggtaaaaagatacaaaacttagaaaacaatttttttgaagcatccccttagcctacacaggtggttcataagggcaatcacatgtgtgatacacaagacaggggaggatcacagatcgcatgtggggaagggtttccataagtggttatcttaagtcgacggcctctagaaatataaccatttccacaagaggtctacttagatgactgcctctgataatagacatgaccataatatgtgattatgtcacttgcccagctattctcacatgtagtttacctaggttgatagctccactataagggcctatttcctcgagctgctccttttcagattgagcttgtcaaaagtggagcatgttagaagtggagcaactcacaacctagaaattgtcatgtggagtcgactcttgacgaaattatttattgctcaaaggatgatgatagtgtgaatcactatgataattacagaaataaccctaaaaagtcactaagccaaacatttgagtcaacccctccggccctcctttgaattcatagtaacctcaacacgggttctacaccgttctacaccattgttacatgtgaaattattgcttttgagtgagaagcatgggtgttgtaatcgtgggtatcaaaacatgcacggatgtgctatcatcgtaaatcctatctatatatcctatataattggaaccaaaagcttgacatgcattgagccacatcatctagaaaaatatatggtgatggaactaattttatgatgatatccattgtgggaccacacaataaactaataagttatcagctcatgcgccatgaacatctcaaggtaaaagataaaactagtatgtctttgttgttgaattaattccatatagagaattagaaatgcagctcatgcatgcaaggaaagtagattggttaggcattgttttccacccacatcttagttgatcttttgaggtgttggatattgattgtataatcaacatgtgtccacactttttacacattgtactaacacatctacttccactatccctcacaatctctctccctcaccctctctccgtgcacacacgtcttgtctgcaaggaccacaccccatccccagccaccaatctccacatcaaaatcccgtgactcctccctaattgatccccaaccatccttctccacatacacctatattcctactccccatccatttcctcattgtctctgtcgtttcacggtgcgtgcctcccctccacccctctccatcactcactcattccacctgtagggctcctgcttgttacccctatccatggcccgcatctccttccacacgccctacccccgatgactctcacctttcaccctatacaccaccccactacttgatactcctcctctatcgcttatctctccctgcccccatcacatcccttcctccaccatatacacctcatcatgtcacttccctctgtccatcccgcctcctccatcgaggacaccactcctccccctcatcctcttctccaccatcccatgtgtccataacggtttgaaacctacacgtaacattagatccacatgattctatggttcatttagatgtggatgaagataagataatggtgacttgtgtgttaccccatccttcaatatcgatgagcaaaacaactgagaggaagagaggaagaccacgcaagcatgcgcaaggaatttcggtgtcttctattaatctagaaggcaacaacaatatttctctaacaattcacttacccaaattagatatatatagtcaaataaagagaggaatgcctgcccaagcatgtgacaaatactttagaggatccttctcaaacttctattgttgagtgcaagaagagggagggttgaccatatcatttgcgtagtaattgaaaaaaaatgttgagtaattcatgtttgctagtacctgatggatcgacaaaacataagcgatcatcggaacttgacagggacgacttgcatctgccattttttttttcaaatttcagatcatcctagcgaatatgtcaatgaaatattcatcatgatgggccaaattctactatgtcattcatatcctacactttttaattatgtatcacacacaaactcacacacacacacacacacacacacacacacacacaattttacccttaccctctccaagggatgatgtggtgtgccaacttggctgatgtagctgaagtgaatgtaggcatgccacatcagctcctagcaggatgttgatgctttgggatgtacaatagtacattagacaagattaaaagtataaatatacaatacaaaagattttagagtctacatggcgctctattgcaagtttaaaccattatatgcctagcaatttgtttgacatcattttcttataaattagatgatgccccacactttgttgcggaatacatggatgaatctatcttaaaattgaacacaacatgataagggatgaggtgaagaagggaaagaagttggagaaagaggtaaattctgagtgactaattaatggaagacgtattaacttggaataagtgaagtttacatatgactttctgaatcatagggtcacttcaaaattcattgaattccctgttgcaacaaatattttttagatagtaatagtactagatatggagtcgtaatgaaggaaagaaataaaccgaaacaacctcgttttatatcatacaatgaatgaatgaattgtttgttggttgtggtgtagtagtaggcgaatacccatacgcgacagcagcggtggaggagaaagcggtggtggcgtctggagacgaaggataagccgaccacacagtagggatgagcgagtgtgagcctcctcctcctctgtgaggaagaagaaggggaaggaggagtgcacgtggcaatgcacggaggagctaattctctcttctctcatgaagccacatcacctcagtttttttttttttttacttttggatgattcgtcaatgctgcaaactgtatctcttcacccaaaaagccacatcatctaccctaatcatttataaccttgatcgaggtacaatatacaaaaatcacatgaaagaaaattgtatagttagcaacaaagtaaaatttacaactcatatgtaatattttgtcatgcagatttcccacagcaacgtgggggattctcatctattttatttatgttcacggattttattattgagagagcgtgggttaaaggaggcacactcaaaaagtatgagtataatgtatactagattttttttatggtggtctctactactagaattaatctagatgtttcatatttttttttatctgatagaacatattagtttctaacaccatcttaattattgataatagattatttctttctttttgggggtggggagggggttgatcatttctatttttctggggaagcactgcacggcaagcattttataaatcaatgattatttctaccagtagtagaatccgtaaataaatggtttagatcatttttacttctgacaatattgattgtaccgtaaaaagtgaaagcaagtaatttcacctgcaaaaggaaaggaaatgggaaagaataagcaaagtcgggaaacaactaggtcgtgcgtgtggcctcggaatagttttggattaaaatccaaagtcattgcaaacacccacttaacttatcccatgccgatccaagggattggaattagacacactactacttcctttacagcattttctatattttgtactatgcgcttgttttctataatttctagccagttttatctaatgatagttacaatgaagagatgatggcgcatatggtgaatgctagtctcagtcaacactacaagcatgctagggaagggccaaaacatcacaaaggcggaagcgataactacttgagctagaaaataaagtagttttcttgtgtctagctaccatttaacatatttttctattggaacctatgatactgataaaaaaagtatatccttccatttgttgttagaaatttgagattgcatatgtgctttatacgacaaccaaaaagaacataaaattattggttaccaatgctataattggattagtaataaggcaccttgccttttaccatcttaggtagtgttatttgtgatagttacaagagatttacttgtgtgaattgaaaaattgcaaccacaaactatttaacaacaagtttactataattctatgcttttgggaaactggtgatcaaagaaaaagagcaaagaaaaagccgagggcaatctcttatgaaattcataaactggtgatgtcactaattttatgatgatatacattgtgagaccacacaatgaactaataagttataagctcatgcgcctctcatgcgccatgaacatctcaaggttaaagataaaactagtatgtctttgttgttgaattaattccatatagagaattagaaatgcagctcatgcatgcaaggaaagtagattggttaggcattattttccacccacatcttagttgatcttttgaggtgttggatattgattgtataatcaacatgtgtccacactttttacacattgtactaacacatctacttccactatccctcacagtctctctccctcaccctctctccgtgcacacacgtcttgtctgcaaggaccacaccccatccccagccaccaatctccacatcaaaatcccgtgactcctccctaattgatccccaaccatccttctccacatacacctatattcctactccccatccatttcctcattgtctctgtcgtttcacggtgcgtgcctcccctccacccctctccatcgctcactcattccacctgtagggctcctgcttgttacccctatccatggcccgcatctccttccacacgccctacccccgatgactctcaccttccaccctacacaccacctcactacttgatactcctcctctatcgcttatctctccctgcccccatcacatcccttcctccaccatatacacctcatcatgtcacttccctctgtccatccagcctcctccatcaaggacaccactcctcctcctcatcctcttctccaccatcccatatgtccataacggtttgaaacctacacgtaacattagatccacatgattctatggttcatttagatgtggatgaagataagataatggtgacttgtgtgttaccccatccttcaatatcgatgagcaaaacaattgagaggaagagaggaagaccatgcaagcatgcgcaaggaatttcggtgtcttctattaatctagaaggcaacaacaatatttctctaacaattcgcttacccaaattagatatatatagtcaaataaagagaggaaggcctgcccaagcatgtgacaaatactttagaggatccttctcaaacttctattgttgagtgcaagaagagggagggttgaccataccatttgcgtagtaattgaaaaaaattgttgagtaattcatgtttgctagtacctgatggatcgacaaaacataagcgatcatgggaacttgactgggacgacttgcatctgccatttctttttcaaatttcagatcatcctagcgaatttgtcaatgaaatattcatcatgatgggccaaattctattatgttattcatatcctacactttttaattatgtaacacacacaaactctctctctctcacacacacaaactctctctctctctctctcacacacacacacacacaaactcactctctctctctctctctcacacacacacacacgcacaattttacccttaccctctccaagggctgatgtggtgtgccaacttggctgatgtagctgaagtgaatgcaggcatgccacatcagctcctagcaggatgttgatgcttttggatgagcgatattacattagacaagtttaaaagtataaatatacaatacaaaagtttttagagtctacatggcgctctattgcaagtttaaaaccattatatgcctagcaatttgtttgacatcattttcttataaattggatgatgccccacactttgttacggaatacatggatgaatctatcttaaaattgaacacaacatgacaagggatgaggtgaagaagggaaagaagttggagaaagaggtaaattctgaatgactaattaatggaagacatattaacttggaataagtgaagtttacatatgactttctgaatcttagggtcacttcaaaattcattgaaacaatattgcaaaaattttgttgaagaatatatcagaggcctatttgttttcatatgttctttaatatctcctgtgcatgtattggaaaataagattggttcatggggtagaaatggtggggtcacttgcaatatcaaggtggcacccaaaagcgcataatcatcgatgcacttgcattttcttacttgaatcaccgaataggacttctgatattattctagcgggacttctgatgttatgttagtgaatgtaaatgaggaatgaaatggccaaaattacacggtgggacttctgataatcatggatgcacaattgttcttaacatcagttgtctagagtagtgactgccgctataattatcaaaactgaggttgagattcttttttctgattgctactaatcaacagcatgatttcagagtccccgcagaacaaaatgtctaacaaagattagctcgaaaccaaaattcctacttatatctgtcttaagatataaatgcacatggatgaaccaaaaaaaaatattttccaagcacaagtcatgtaaacttaactttagttatagtagatcaatgtaatgcatttgaatagtcgaaatattaaaaacagagtccaacaatatccactcagattcctagaagtccaaatgaaaacttgcgctatgtagtactattggtatgactatgacatcctcaatcgacctacttgtgacaattcttctaggtcttctccaacgcttctaaggatcatgatttagttttagggttttgaagagtggatcgtgggagagatcgtcacccgacgtatggggttttatcttcttttatatggcgtgtgggacttggggcgatccaacaacaacaaaaaagaagcacttccgatcgtggacacgagtttgctaggacatgcacatgtgggcatgggtggacctagtccatggacgacttagcctccgatcgtagacacgagtttgctaggacgggcacatgtgggcatgggtgggcctagtccatggactacttagtctcagttgctccgaaaccaaccgaaaaaaatcaaatagattctttctagcatgccagatccgagccattcaatgaattcttgcaacgaaggaaagggaaagcattttgagtgcaatgtttggactcattctacccaggctttgaaagataatttgttgcagatcatacttgaattgtatttgaaggaggacatatctggagtattggagctcgcattagaatacctatggagtattggatcaggaataatttttcatcaatgctcaattcttgacctttggaaaactcggtcaaattaatcaacaagaataatatattcttatgctttccatagtaaaaaaacaaaaaatcttccacacaagaacaaaaacataacaacctcaattttctagatcatgcaaaatatgatcaacaaaactcaaattgttttcctacaacagttcaatattatcatgcaaccatattaaattctacagaaggatttaaattaataccaaacacatcataaaataattattgacacaagagtacttgtccaatttattctgtttttgggctgttcaatccgatgaaagtggaaaaaattcttttgcatgcacactgaaaataacccttttttccttattccctagctgcaatttgcactaggacaattcatcattttagtgatttacagcaaccaggttggtttatacccttagcatgccaccaagaactgaaggaggtagacctcccattttctcacttctcaatttaaccaatagttcttggagccattgctgcattgcaggatcattatgcattttcagtaaaggaaactatattgaacagttgattgcaactatcagcctattctaatattgtttcagtggaatgatattttttttgagagccgataactacaatgtacaactcaccttaacaaggttgatgaatgtgccatctttcaatgtcataggaaggtaaggctgcagtgcctgcaagcccctcaaacattgaagaggggaatgctttagaagaagtttgaaaaaaagagagagataattctacaacaatgaagtgaggaaacaaacctaggattgtctgtgatccctaggtaatagtggataatgtgcttcagcaaccttggagagggcatgtcatccattgaggtgaccatgcctgctaaagtaatcatcacagcgaagaacagatcagcggtggcacaaatgtgaccaagcccacatcatccaacacaatctttttataacaaaagttgcctcctgcatatatagttgagtaaatcattgaataaatgcaactcgtctaaagtttaccagaatgaaatcatagtgtacatgatcaatatgatatacttagcaaagatacatggtcaatacatcactaacaataggaaaatgccaatagctgcattggtacagataatttatatcaatcatttaattgctacaaagtattccgaatcggcaagacccaaagtatacaaagaattactatatatcaataaatgaattgctacaaagcattccacatctttgaggatctaaagtatactttgagctaatgctagctgaaaataaaaatgtgctcatgccaaactttacataggaaagaatactaaaagaaataaaattaaagttggtgttattttaggagatgattgatatggctggctacttacattttttgaaagttcactgcctatcaccatgcatgcaagtagagaggaacaaactcatattgcagcaaaaaaatgttgtgcactgtcgcctgtatgtatcacaattagaagaagcttcattctcattcttcatagacatgtttgtggaacaccccaagaaagaaagaaatgtttcatatgttccatgtaagtaaagaaaaatattggtcctttttcaaggctttggttttctagccatagatactaattaattttgcttcaagtgcaaactgtacaacactgaaccataaagtttatgctacctctatagctaaatatatgacactgttgacttttttcgatttttgatgtgcaattttgaccattgtttttatataagaatagcaacatatctaaaaacattcttataatattgaaaagtacttatgaagaaaactataccatgtgatctttacattttttagggttattgatgctcgaagtttcaaaagtttaaccgaataaggttagcaatgtcatatattaaaatacaaatgaagtaattcttaatgaaattattaagatatatatactagttttactagcatgaatcgaaacaagcggttgaattaaaccttagtgatgctgattagctagtggctggtctccgctagaaactaataactgtgccatccccagccacctatctccgcatcaaaaccccgtgactcttccctaatcgatccccaaccatccttctccacatacacctatgttcctcctccccatccctttcatcattgtctccatcgttccacggtgcgtgcctcctctccacccctctccggctccgccgcctctctccttccattcataaggctccttcttgttacccctctccacgctctacatctccttccacacgccctacccctgctgcctctctccttccaacccgcacacaaccccactacttgagagacataccctaccgcctatctctcccttcccccatcacatcccttcctccactatatacacctcctcatgtcacttcccgttgtccatgcatcccacctcctccaccaaggacaccactcctccccatcttcttctccaccatcccatgtgtgcataatggtttgaaaccaacacgaaacattagatccacatgatccatgagcaaatgagctgagaggaagagaggaagaccacgcaagcatgcgcaaggaacttcagtgtcttcaatctagaaggtaaaaacaatgtttctctaacacttcccttagctaaattagatatatctagtcaaagaaagagataaaggctgcccaagcatgtgacaaataatttagagaatccttttcaaacttttattgttgagtgcaaagagagtagggttgaccatatcatttgcgtagtaattcaatagttttgttgagtaattcatgtttttgccagtaactgatggagcgacaaaatagaaacgttcatggggacttgacagggacgacatgcatatgctttttttttttcaaaattcagatcatcctagggaatctatcaatgatatattcatcatgaagggtcaaattctattatgtcatccatatcctacacttttaaattatgaaaaaaaatgcacacacacaaatcactctctcacacacatacacacacaaacccactctctctctctctctctctctcacacacacacacacaaactcacacacacacacacacacacacaaacaattttacccataccctctccgagggctgttgtggtgtgccattttggagctgatgtagcagaagtgaatgcacgatggtgtgttctcacacatcacatcatctccgcgtaggcatgccacatcaactcttggtaggatgtcgatgcttttggacatgtgatagtacatgagacaagtttaaaagtataagtatacaatataaatgtttttagagtctttatggtgctttatggcaagtttaaaaccattataagcttagcaatttgttggacatcattttcttataaactactagatgattcccgcacgatgttgcagaatgcatggatgaatctatcctagatattgtaaaagtactatatgaatatgttaaaacatagggacaatgatgtggggatgatgatttgatgtgcttgaatgttaagctctataaagtaataaatcatagatgatatggatacttccattagctttaagatgtaatattgctaatggatgattatgtggcatgttcgtatattaagctttaggatgtagtgggtatagatacatacatgaactttgtaggaatattcttctgttagattattcttcatacacaaatatgtcatcaaacccgttttgtccatatgatatagtcaaggactttcttaattaaggcccctttttaagaatggactaatggaggaattttaacgattcaaatctttcacgtttattttttctaatcctgtgtaacaaatgattggagtttctaaaatcctataaaattcctttggaatagtatagtggatggagattttagaagatatttagcataaggtctattctattgtaaactttccttttccgtctatctctacaattcctgtatttttcttgtagcctttccgtgttctctacatatttatttttataaaatcatcatgtgttttattattcgaatgttccaaatagggtctactaagtgttactccttcaggtgtatactaaggtggtgtttggatccagggacttaactttagtccttgtatttagacactaatttagagtattaaatatagactacttacaaaactaattacataaatgaaagctaattcgcgagacaaattttttaagcctaatcaatccataattagagaatgtttactgtagcatcacataggctaatcatggattaattaggctcaaaagattcgtctcgtgaattagtccaagattatggatgggttttattaatagtctacgtttaatatttataattagtgcccaaacatccgatgtaatagggacttaaaaggtggttttagtcccatctatacaggctcaatgtactgaggtaaaaccatgagtgacaatcaagtcttttggtaagagataccacttgcaattgcatagtagtagtattgaattcagaaagataatcgtacacgcttatgtttggcagttctgttttaatcattgcatcattaggtagcgtacgggcgacctagacaaagtagggggattttcaggtgtcacctaagcctgaattccttcatgatttttctctaattgaaccgtaaatccacatgacgagagaccaacatcaaataccagatatgccagcaaggtcattaactcataatgctataaacagaactaggattccattagggttaaaacacaacatgaaaacacacatctgctacaattacagggttacaaaacctgacatctgaaatacaaatacaaatcatcatactataattctctcaaaaattcccagctcccacacttcttctctgaagtggaaagtggaaaacagtttaggtgaatttcgtaagtcataacatgcttacaggagaaagaaacacggatataaacagagccacaaaaggcatcggatttccctatctacaggtgaaattgttcccagatcaggacagcacaaaaatatattctgatctcaataaaatataatagatatgcccatgacagaacacccaatagctacccaggggctaaggcgctcacctgaaaggcaaaaaaaaaacagagaaaatcaacatactaatattatttatacgatctatatgcaatgaagggtgaaaaaatgttaaaacaaaacatagaaaaacataagtaaacatgcaactctgcctttatgagacgaagttaggaaattgcaatacaaaaacatctaatattgatactgcaagtcaaattcaaggaagtaaagttaagtctacaaagaaatttcccatgcttgggcatagcaactccgtcccagctaacgaacatggctgtatcccttgactggagattaaaagtatatcatgcatactccatttatgcttatctgcagcttctagcccctgtcgtcattctaattcaaactcaagtaccaactgacaaaacattattggaaattatcactatatttatctttggctgattaacctgaaatcctgagtctatcaaaggaagatttctgtaaaataatgttaccattttaattgagacatagaacaatgaagactctagctaacttaataatggactaatggtagctctcacttcttatggtaccaatgtacgtattgtgattttgtcatgtgagcttatctttgtttctttaccaacataatataatgtgaagttccagattaatgtttagatgtttcatgtttgtaaatatattgctagtgccatgaggcaggattcatgaaagaataatttatacccctatctgttcacatttcacaaggacaaacattctgcatgtttatcaagccataaaatttaactttgcatctctaccttcatctttcgttgtacttttgatcattatatctattgatagtattttctgatattgtaactgcacatctttaagaaaaataaaacatgatgcaagacaactgaatacaacagtttcagaatgcatgcgctgatgcagcactggataaatctattatattattaagacagctcgaaaaaaagacaccacgttcgctgtggaggctagaaattcccacgttaatcgaagaaaaagaaaagaagagtccaagtagaaatacaatttaaaaatagctgaaattcggaattaaaaatatgcaatatggaaataagtttccatataggaacccaatacgtgattaatcaaaattctaaataataataaaataaatatcaaagttagaaaaagaaaaaaggagagtccaagtaggaatataatttaaaaataactgaaattcgaaattaaaaataagaaatattgaaagaagagtccatacaagaatccaatacgagattaataaaaattcggaataaaaataaaaataaatccgaaattagacaaagaaaataaagaagagttcaagtaggaatacaatttaaaattagctgaaattcgaaattaaaaataagcaatactgaaagaagaatacatataagaaccaaatacgagattaattaaaaattcaaataaaaaataaaataatatccaaaattagaaaaattaaaagagagcacaagcaggaatacaattttgaaacaactgaaattgaaaataaaaaataaaaacattaaaagaacacaatacggtattaactaatttttttttaaaaaataaattctgaaattagaaataaaaataagatttcaattaggaataaaatttataaataactaaaatttgtgataaaaataaagactattgaaagaaaataccatctaaaacaaacgacgagataagttaagtaacaagcctataaaggagtagagttggtggcggttgatacgacatataaaaattgttactaaaacaccaaatagaatcctaatgacgattaaaagaagggacgtcaggcaggccgtgaagcaaataagtaaggcgttgccgggacttctagaaagtaaaaaaaaaattgataatcatattcgatttttaaaatctcaatgacaataaaaaggagaagtagcgggcggtgtgtataagagtatagttgcagagccgccgacggttgacgggacttcaagaaaataaaaaaagaattacaacgatagttatgttcgatttttagaatcacaatgacaataaagagtaggcggcggacggctgtagagggggcatagtggcatcatttgatgggacttctaaaaattataaaaaatgaaactacaagtccaatttttaaaggttcggaacttccaaaaagtaaaaaaaaagctaaaaaaatgataatcatgtacgattttaaaatctcaatgacaataaagaagggagacagcgggtgagccgtagaggagtacaatggcaaaaccgctgacggtttggcgggacttctagaaagtaaaaatgaacacaaacaataattatgttcgatttttaaaatctcaatgacaataaagagaagatatagtggacgggccgtagaggagtataatggcaacgtttgacgggacatctagaaattataaaaacgaaacccaacgtgacaataaactctaaaaactataaaatccaattttaaaggttccaagaagaatgaatagaaatagtgatagatcgagcaagcaaataaagaaggagatgacataaggggtagcaattggtgtgacttttaaaaactatataattagaaaacgatgatggtaagatttggtctttcaaagtcttaagacaatgagatagctatgtaataaattttaagtaaaatcatactaaaaaatatatgatttttttggtgctagccgcgcaattgcgcgggccacccagctagttatattttaactagaacaaaaagattgacaaaataagtatgaagtttacctatcctagcagccttccaaaagaaaccacgaaatctgagaacatgagaaaggtaacataatcagagccatagatcttttgaattagacaggttaatgtacaaagattgtgctatggaaaaaaacaataatttaattacattgaacaacatatacttttgaaacacgagaaatgccaatgagcttgtgcactaaaaaacaaaagcatttcagcttttaatatatcactagaaggttgccaatgatgtgcatcacttggcaagatagaatcatgctatccaccaaaagttaaatccattctacaaggcttgatgtaccgatgccacatttattatttcaagtgccaggtgtattaaactaattggcttaactgcttgcttgcacaatggcaactttagtatggaaaaaaaacataaaatttctttaaatcagacatcccattagcgggctccattagtttattacataccctctaattcccagtttcaactagccaatgcactgctatccggatcgcaacccccacaagagattactagataaatgaaatgagcgattaccaatatgttcctttctaaattaccatagatggggatgtattacatccatcataggcacccctacgattaacaaataaaggtttttgtttggtatagaaaaatgtaattttggtaagctgaccatgaccagactttgtattcacatgcagggcaaaatacccaactacaaatccactaataactcaaaagaaagtacctgtgcaatgattttgacaccgatttcaggggaaaagaaagaacttttttttttggggggggggggtgggggggcatgtagtggccaagttacagttatgtattacagagttatatcttagattcgattgaacatttttcagttccatattatctgttctatctaaatactaccgtccttatctccttaaaagcctagtttttttcctgtgcaaaaacacagttacataggatctgaagacacagaaaaatctttcatgacatctaatcaaaatcaatgttgttcgccagcagaggttttagcatgccatataaggttagcagcatttgcagacctcattccaatccaacccacggcaaacaattcctccctagaagagacttcatggcacgtaataaaattaacattcacaaaagaatcacatcggctatccaacattaaaatttcttccatcttccccattgtttcgatctattccatccccaaattcagcctaacacattcttcaggtccctatgttatttatcccacgaataagaaagggcatggataataaagttccaacgcaggtttgtcacaaagaaggggatcgagcggaagcaaaagcgaggcaggacggagaagaaagcgaagaaccacgaaacgcaccctgtccgtcggacgaggatggaggggaagtgcatcttgaggaaggtgcaggtgcagatcagcagcagcacgacggtgacgaaggagtggaagttgaagagcgcagactgcatccaccaccaccaccatcaggcgaaaaaagcaggaggaacaagatggggcggaggacccggcaaaaaaaaaaaagatggggggaaggtatcagattccaccggcagggcaggagaaggagaagcaaagatcaagaacgggaggaggaatgtctggtggtattaccattgggtccggcgaggactaggaggactggaggaggccggcggcgagatggccaggtgatcggcgcagggcgacggtaggcgcgggcgattgagttgagagcagcagtcggcgacggcgaggggatgcggccactaatgtgggaggcagtgggtcgttttgccttttctctcccctttgttgatgtgcgccgttgggtttagatcggacggtctaaccatgcctgtcgtgttggcactaggatctatggcctatgcctacatgcccacatcaccttgatgctatgtttcaactagagcaactacaataacatgatataaacgggttatacatatttttacatcatatttagatttatgtgaaggagagagaataagagagaggaaaagcgggttataaatttgtactcagttacagtataaactccaataacttatgtgagagtctgagagagaaatgtggggaaagcattaatgtcgtactatgtatctatagttaactattatattagtagtatattaagttagctatagatgatacgttaatctttggagttagtaattgcctatattattaaacttgatcttagtccattgcctagttgtttatttattgtttttatttttatcttaacgtgctatttattaacacacaggttcagtgtagtcacgaatcacaagagaccttacaaactcactccttaacaagctagttcatgagcacaacaattacaagaactacacacaaaagacacatcgaccctgacaatccacatagatcatcgttttgatttgcctgaagatgacgtccaccggagcatgatcatagacagttgactttaaagcatccaccagaacagaacactttgtttcaatggcaatgtgtgagattagtgatgaaaatgatcggaaatagtcagaaacggtatcattattttattagtttttaaatcggacggaaacgatcaggaaattaccatatttatgattttaactatttagtgtcaacttcaatgccacgctgacagaaattggaaaaactaaattttgaaaacggtaaccatcgttaaaaatattattattttattagttttacgaaaacggtattggtacggtcgggaattttcatactgttttcgcccctatgtgagattccatgacttgcctgcagagcatataaacaagcatcagcttcagcactcagagcatcatgcacaatctcaattttttccgcccctgctagcacaacatttccttcatgattccaaataacaaaaccccagccactagatttgctagcttcacagaaagcaccatcaatattcagtttcagctcgccttgaggtggaggtcgccaggtttttagtactcgaggacttggctgggttttcccatagctaagcagtgatgtttcagccaccatcttcattactctatgagttacttcctcggctatccttcattcttctccaagcattcactttgatccttgcatccactttgttccttgcatcccaccagttccaaagtagaaccacaatggacaacatattgtgatcccccatgtttagaatgtgtttacacacctccatagccgagctaagttggcctagctcccgcctaatgtgatccatgttcagtatccaccaacgggcttttgcaaatttgcacttgaaaaaacaatggcctccatcctcatctaaccagtgacaaacaatacataaagtatccacatccaaaccccttctgctgatgttcctgcgcaggggcaggttgttatgggcaagacgccggataaagtgcttcaccttttggaagataatgcaacctccataacttaccccagtctaacatgaccgcactttcttctcccgacgaggtttctcccacttgacgagacgacaaacgctcacattgatcttccgggtatgatatgcagatttaaccgtgagaaggcctcttggttcccaatgccatgcagccgtatcttcaaaaccacttcgcactggtatagctaatatatttttcgcattctcttccgagaaaatatcctagattaaacttctatcccattcacgagttgtcagatcaattaagtcagccacactgttaattatgatccctccttggactgatacgagaacgggttatatttgttggaatccatggatcattcatatatcaatctttgtgccataaccaaccctccagattagaccagatttcagagcttgtacaccgcggacaatgctcctccatgagtaggagatgcctgggcctacttccaagagctttccctcatggaaatattttgctcttaatacccatgcacagagtgactctggattggacagcaactgccaggcctgacgagctagcattcctagattaaaaagatgcaggtctctataccccaaccctcccttatctttctgactgcataaatgttcccaagagatccagtgcattttgttttccctgtcttgttgtgcccaaaagacgtgacatatcaacatactgatcttatcacatagggtcttcgtcagatcaaaacacgacatcgcaaaggtcggaattgcttgcgacacggctttaatcaggatatccttccatgctcgcgacaatagcttttctttccagccttgtatcttccaaactctctcctttagataattgaatgtttttgcttttgatctgcccatatacactaccagcccaaagtatttctcattccaggcctctactccaatatcaagagtcgccttgaaagacgctctcctactttctctggaattgctgttgaacatgatcgacgatttctccttgttaatggtttgccccgagcatatttcatgtaaggatagtacattctgcagacatcccgcactccgctcatcagcctttaggagtaacaacaagtcatccgaacaaaagatgattgatgcttggtgccacccctgatagattaccctgatcttctgcagcattcaacagggacgagaaaccctctgcgcaaatcaggaacaaatatggtgaaatggaatcccctggctcaaacccctggtaggagtaacctgatcagaaagctcaccattcaccttaatgcgataagccaccgtagtcacacacctcatcacaattgtaacccatctcctatcaacaacttctccagaaagacccattccaccctatcaaaggctttgctcatatctagcttcagtgcagcatacccaactaatccactcctttttgttttcaataaatgtgttagttcataagctaggaggatattatctgatgtcacgaccggaattaaaccaacaggcattccattcgtgcgtatattattccttgtcccaggaggcaaggtacaccaaaagttgatacaattcagagtttaacaagcggaagcgtaaatagttaatttattacatgggcgacgaaggcccagcacacacgaagataaacggaaaacagtggaagactagggcgacgaccacaggcacttgacggcaggcacaagctagacaccaaagccttcatcttccaggaactcctcttctgggttggggaaaaattgagcaagattgagtacaaccacagtactcagcaagacacacccacggatgcagaataaatgcaaaggagtacaagggagttataataaaaggggttagggtttgcagtaaacagcatttaaaatacttttagttgcttagggccatttggtaaagacgatcctagagttacacaatgttattaattaaggccgtgaacccacacgaacctgccttaacccaaggcctacgatgattcagaccgaactagcaacccgacctgggtcccagctcgtcccaagccaacccaggccaaccattccacattttagttgttaagcaagttttaagaattaaaccactaacttgggtacattgctaggcttgcccataaccgagggcacagctattcgaatagattatactctgatcagaggtgtacagctttacccacaagacacatctttctcacgtgtaaccacgtgccacataccaccacggcatacgggcgaaagacgtgacatagttcccaacccatcctagccataaaatagagtaccgacccaaccctgactacggccgggattcccgagacaggtaaccaaggttgagcccctagcagcagggcaccggccttgtgccatgacatctcgactaccgggccgcagctcgtgtagccttcatttgccctagagatgtccatcgggccctgacttcgtccatctccatccgtgtacctttgtttatgaccagactgagccacaaactaagccttacccactagacatgtggaagtacggtagttctttgcaacagaggcccgaagaccggtccttatggtggccgaggtgctactatcaaaaccatgcacctcgagcccagcctaaaaccattttgagggttttgaatagagggggaggtgtgtgtccatttccacatagtccaaccattccataatgtccaaatgatatgagtattcccaaagtctaaggttataaaaccacctaatgttgcctaattaatcagcgaagcatctacctaaattcatactagtggaatcataaatagagtacccactagttggggttttattttcctagggtgaacaaggtaataataacaatagcaataaaaataaggtcataacaaaggtaaaaaggcatggccaaataaaatagtgataacgcgggaatttaaataaagcgataatgcattaatttaaaccaaaataattttataaactgggattcaatatgttcaaggatgatgtgacttgccttgctcgctttcccaaatgtcggcttcaacctccacgtagagcggatcttccgaagctgcagcgtctacacgaccaacgggaagaaaaaggcttttactctaataaactccatataaaaagcaggaacaaagcacaaaaatgggttcttgacttcttaaggaaaaattagagacttgaacggtccaattccaagttcaaacgaccaagttatggccatttgaagtttatatgctctttaagtgaatatttgcgaatttcttcatttaaattttaattaaaaatagggtttattgcgtcagccgaggggagggggcgcgcgggccgggtccacgggagtggtgggccccatgcggcagcccctcagtccatagtggaccgggtgcacccgcgggctcaccagccggcgccgtgggccccacgcgtcagccgcacccaaaggcacgggcggctgacggccgggccccacgcggcggccacacggcgcgcccggaggcggccacgtcggcgcggccggtgggaggcggcgcccgcgcccctatggtcgcccctattaatctccaaagatcataaatacaaattcccaatgtaatatatatatatatatatatatatatatatatatatatatatatatatatatatatatatatatatatatataaagagcatgttcgctatattttgtgtattgtgtatttaagtacactggcacgcctgcacatatacatatctctaaacatagagatagagatcatagacgttattctctaccctaaacaaatatacgaataaagaaagcacataatatatgaaaaatttagtaatgccattttgaccgtatttttttaataggagggagtaagtaatttttttgaatgctactcacaattagagttgtttttatttttgaaattcaaaatctaatttaactaatatataatctatatttttaatttatttatttttttcattggtgtttcgatggcatgcatctaactagaaacttgaaataacatagatttttatcacttaattaaagcatagttaacataggtttaaattattagtttggttaatctaagtgagaaagaaaaaaagaaaaaaaaaggacgtaggacccaatgtgagcaatacctatgtagggggctcctagctagcgcgtaagcgcggctagtgagcactcccctctccctattaagcctcatctattagttaatatatacttaacactaattatagaaattaggaaagattctgtagatttttttactagcagattgaaaatttttaagttagatttgaaaacttttgatttaagttttaaatttaaagtcaaattttgaaaactttcaactcaggtttgaaaacttttaacttgagatttgaaaactttcaactcagattcgaaaactttcaactcgagaatcgagattcgaaaactttcaactccagatttgaaaattttgaaaacttccaatttgagatttgaaaattttcaactcaagatttaaaaaatttcaactcgagattcgaaaactttctagtccagatttgaaaaattttgaaaaactttcaaatcaagatttgaaaactttcaagtcgagatttaaaaactttcaagttcaaatttgaaaaattttcaactcaaaatttaaaaactttcaaactcaaaacatactaaaaagattaaaaataataatcagaaaaaagtggaaagaaaaaacaaaaaaaaatggtaaaaaaacgaaagaaaagcgtgggaggaagcggcgcgcgccatcgggccggcgctgggccttctgggcccgaaacacgcgcctctggcgcgcgcgcgtgaattagcgattctgacccccccaatgtgtgtacgttattaattttcttgcgagcaatacctatgtacgacgtgcacgtacgcgggagcggcgatacatatgttggcatacgttggtttttgagagataaatttaacaggtattttttatgataaatttagtggttgaaaataataatgggttagattaaatgaaaaccgacgattaaatgttttgattctttttcttataatttctatgatttattagaacgtcacgtaccggtctaggattaaatgttttgattctttttcttataatttctatgatttattagagcgtcacgtaccggtctaggaacgttcgtacgataacacatgacggttttagagggtttatagaaagttttgtggatttttaggtgtataatagatagatagatagatagaagtaattgacctactcctttcgggctagtaatacttgtcgaaaacgacaaagatacgattaataaaacataagaactatccacttaggagtttaagagcctcatcttttcgtttatgctatgcttattagctaaaatttaaattttcaaccataagagttggttttggggttttccattgaagtttattttttagtctttacttttagatcgttaagaagttttatttacaaattatttttcatttgcaaatatgatgtttgggttattccctaattaattaagcgaaacgatgaggtcgtaaaattcgctcttagtgttataactatatatgtgcactcataatcgttataatcagattttttgtcattgcaacatgtagaagataaattttactatgcatatttgtagagtgatctatcatatattaatctatattattgaattatttttttaaaaaatataatcatttaagtgacacggaaacaataagagaacgttcactctaagatctattatatactaaaagtccattaaactttctaaaaacgctctcaagctgccatatagcctcctataaacgctcataaattgataagtggcaatctaataaatcggtggacctactattttcaaatattagatttatctttagaagaaaagactccataattcatctccttttcctctccggtggacccaataacactaaccattagattaaatccccaatcacccgtttctcctggacccacaggtacgtatatatcatacatacgtgccaccatatcatgtacgtatcattcttctctttcctttttcatctttgtattaaggttatggtctgcatctacttctcccgaatgaatatatctccaaacaaaaacgcatgtacgtttatatctccaaacaaaacaaacacaggcatatctgcgtttctcattagcacctatctcttctgatcagttgatctcttttcatattttcatttgaactattaatttataatttggtacttaaataattcaatacacactcatattttcctatataaaatttaaaataaattataggtccatattctttgcacggaaactaaatatataacatccgattggtttgaactgttatattatttataattaaataaataagttgggatctatattaccatattttagtatataaaactaattattgcatcatatatccttatcatttatacaacaaccaaataacagtgaatgattaacaaaaaaaaaaggtaatatgtattatgtcatttttatcttaaatctttttgtgtagtaaatatacattaaacaccctctaaataactcttaaatcatgacgtgccacgttaaattagaaaaaaaaactaagaaaaggttaaaaatagaaaatcatgttagcatcagttttcacttactacatctatttttcaattattattgagcgacccattattttcagccattatagctacttttagaaaaaccttaaggctccacatgccacgtcttagaaattagaaaaagatcttagaatacggaaaaaaaagcacctaatcattagttttcacttatatcatttagaaaaataataaaaacaaagttcccttcacatcccctcccctcacaggcgcacatcactatccaccccctctccatgccttggactctacgctcttcattcctctcctccttcatattatttcactataaaactaaagaagaaacaactaataattgtagatattgaaacgatgatatttttttcaagatacatgtcttaatctaatctaactgttgatataattataactaaactaacaatttatgatccacatgcttatattttgacatataagaaatatattatttggccacaattgaagaaaagaattagaaaattttgcttcttacttttcactaaaattgaaaaggctattgccataaccattgccataacaattacgttagataattgaaataacttactaatagattagaaaaattacctaagcaatgcggagaagaaaatttatggagaaaccatacttttaaagtgtgctagatactattggattaatattccacactcataacaatctcaaccgtagtatgatatctgcccgcgcattcgcgtgggctaccttcctagttttagaaaattttccctgttggcccttagaaactgtcaacagctcagtagctagtcccatgtgcttgcatgcgaaagcttgtaggcgcgcgactctatttattccataaataaaacatgcaaagtaatatatatgcaacgactatgttaacacaacaatttatgcaacgacgacaatgtgaacacaacagtttatgcaaaggtagcccgaaaacatttttcacaccgattgtgactgcgtggcgtgagaagggcgctggacgatgcccgcgtgtgtgaggagagcccagaggtgggtaatgagctcgccgcccattgtcaggtgctcgacgtgcgccatcgcattgtccgccggggtgacgaacagcatcagctccgcccagaagtcagccaagacctcccacctctttgcctccccgatcttcatcaggtcttctgcaagcctcactccgaggacgtggatgctgtcaggcgccgatgtgctcggcgtccgaatcgctagctttgccgtgtcctggagcttaagaactgcagcttcgttcgacgtacagccgtggaggcagcggcggagatcgagcagcactgcctcggcgatcgtctgggtggtgtattggtggtctggcaaaagatccggcgcggacgacaccaggtacgcgcagtacctcgacaaactcatcgcgatttcacggtgacgacgttgttggtcgccgccgccgccggcggctctgctcgcgcgtgcgcgtgttttgacgtcgcagatgtaggtggcgatgtgccagatcagaatggtgtgcgcgcaggtcgcatgctttcacgccttgcctagcgacaacatctgttcgaatttgtgacccttcagtaaggcgcacccgtcgctgagaacgccaccgcttttcttcaggggagaagcgagcgcattctgcaggtcgcccgacagcttcgctgatcgggtcttaccactgttgaacatcagattgtccagccacccacgagtcacgcccgacagccagtccttgacggggtggccgagaatggcgtggcgaatgatggagtattgtctcatcttcctcgtccagtacttgccgctgccacagtagcacagcacacccagcagcacctcgatgaaagggttattctgcaacgacgacggccagagaacatacctgcacagcaccttcaccttctgccagtcggagaagagcacagcaacgaactggtaggcctccagaacaatgacaaggactatgatggccatggtgaggacgacgtcgaggttgatgtcgtaaagcatgatacttctgtggtgcgtaggatggtagtgtcgaagtgctggggagaggagggtcagcacgccgacggtcaccatgatggcgcacatggcaaggtgcggtaatgtggtcgtgacggcgtggcagacgaaagggtacctcgtgtagaacaggtcgtagaggaagccgagctccacttcgatcacctggaaagctctagtgctgccttgttctaggaggcgattgagaaccaggttcctagtcttaggcaagccggactcggccaagggaaagttgccgcacctccgccggagtagcttgaacagagcaaaagagaggcaaagatcccgtcgccgatctgagctttttagcagccatcccttgcactgccagaccctctccaccgtcaccagcttatcgttgtgatcttccttcttgatcttcttgatttagtcgggcgcctccgtcaccgtgttgtccgtctcttcccccctgactatgtacatgtaacctaccatgggatcgggattggtattggtattggtatttggatcttcggcgccgccatggctggactcggtctggttgatcatgtagtcagtaatgagctggttgtccctctgcaacccgtcggattgtagggcctgccggtagctgagtgcgctcaacgcaatcttccccaggctgaccaaccacactccaaagacgaacaacttgagcttcgcggagagcacgttggagtaatactggagcagtacggtgacgtagatgacctggaggcctcggttgagcaggatgatcccggggctcttgacgtcggcgagggagtaggcggtgatggtgtcggagctggcgaggacgaagaggaagaagcaggaccagaccaggaacagctcgtggtgcataggggtggactgcatgagaccgatggtgtaggcggcgagcgggtacgacaccgcgaaggcgccccacaggatgaaccggaccatggcgctgccgctgtagcgcctcgaggagccgaggaagacgagcaacgcgaggacgacggaacagaggagcaccagggcttcgatccgggccagctggcggagatcgcagtcgggcggtagtgccgcggtcgcattgcatacccacatctcggctctccggtctgaactcgcaagctagaaatgatgaaggtagctaatgttctagagagaacgattgtcactgtgttcgagacttcgaggatgaatgaacctggctgtatgcacacggtatatataggccaacatgtcaccatcaccatgttaattagccagtactagccacctctgactgcctatgccaatggctgccacacgcccaatcatctgcgtgtgcgtgccagagtgtagttgctggtggggtgacgcccagcccagcacgtcatgccaccatgacgttcgtccagcagctgtgccacgtaacgagcctgcagcgacgctacattgacctcgctagtcgctgcgttggcataccgccacccgtatagcacgctgtgtgccgccatcctcgctacacggcaaaccggtggcgcagtaagagcaagtttaataggacagcccactactaactccaaatcatctatagcctaatttatacaaccagtaaggaaacccgcgcagatgcgcgggtaatttatttgttgtttataaaaaaagaatataaataattgtgaaccatagattacattataatcgtaaaagaaagaaatatttataccatgaaataaaccataaacttttgatatactaaatgataatgtctattatattcaaatataggttttgtttttttcttttactatacatctaagtcgcctacgcatgttcatgggtaataatacgaaggaataatccacattgtcaaaattatttgtgctaattttgttaacactttttatatgagaatagcataattacataaggatataatatgtttccatgtgaatagtagtatatgcattcataggatggtgtgcacatatttatacgagcgtttacgattgccttttacatggttagtaaaaaatactttcaaaaagtttggtgggatggcatgaagcggcgccacagtggcacgactttttcgagaagatcgccatgagtgtcattacataaactttactttagtgcctcaaagaaagaaacaaaaaactatcagatggagcagattgtatatgaactcttcttttttattctttttgacatatcttgtgtatatatgtacatacaaagcgattaaatggtttttagttggaatagatctaatttaatggttgaaaataatggatctacgtgtataccaatggccaaatattttgttttcttataatgtttctattttttttctaatttattagagttgtcacgtggcatcttaagagtgcttttggagtgtagaaatgttattactctcactggcaacctactcaccgtcaactattgtttgttgtggtttagtggcatactcttcttacgtaccatttgttgaagttgcccacttagtataatcctatattcagttcttgatgacacacattcttattaataagaatatcagctaattattaggtgcactgtgtgcacgaatgcctcttaagcaatattcccactaatacagaacttatatacttatgattagtgggaatatacgattgatatattagactattttgtattgataaagtatattatatactacatattaagggttttagtatgtaagcaataagttgtaaagtacttatcggattggctactcttttatttgttgtgagcacgtttcctcgattgatctaggagtttttataaaataaataataccttttgataataatatctaagtccgtctaaaccattatatttcttataattaaattggtaatcatgacctgcattttatatatttaagtgcaacgtgagtattattagaaatatattctagataataaaagataaatctatttttggctttataatatttaattaatcttgcactaatgacttgtgtcgtttcgtgtgtccaagataagctcagctattgagctagatcaaagcctagctagatcaaagcctaagtaggagatagaagctacacatcgacacggtgtcaaaacaatatataagatctttaattttcaaatattatacgaatagagaaaacacataatacctgaaaatacgttcatgatataatttagtaatatcattttgacatattattatcttttacctagggaacggaaaatttttagaattgttagtcacaattagagttgtttttattttatttatatttttatggatgtttcaatgaaatgcacctaattagaaactctatataacatatattttgcatattaaacataggcagtttgattttctatctaataagtgagaatgaaaaaaagatgatgtgggcccagtgtcgtacgtacatatcaaagtatggacgtactttttgttttttttggaaatacctattcttgcaagtgcaatgcgagttttttgataaatttaattgtattttttataatagatctaatggttagaaataatgggtccaccggattctaaaatttattagagtgacacgtggcgactcgagagtgtttataggatgccacatggcagtcttggagtgtttgtagcaagtttaatggacttttagtatataatagatagaagatagaagatagataatagatagatagatagatagaagatagatagatagttatttactacactattaatacatggtctcacctatcatatacacattacgtcttagagttcgtgctgcagctggctatagatctgtagcccgctactattctctctcttttttatctctttaaaatatgtttatagctggcttcctgctattttacctgctctaacgatcgcatgcatgtcgccaccaaacactactgcgcgcatgcacatgcactgcgccggaggggaatccaagattaaaattgttggatggactgaaagaactgagtcaatgcaatacacctgattaaagaacaacaattatctattattatcagcctgttcatccacggtttaaacgggttagtacatcaacccagtccaaaccggaaattagcggtttaaacggtttgggttacacgggtttgacgggctgaaccgtggtggcccgtggccgtcgtcttccacctctgcacaggagaagcaagaaaagcagaacagccatggtaatgcataagaatccatcccatgacgccatttgatgccatctagagctgcggatgccgctcgtcgagcgcagggacatggccctgggcagccacaataaatcgacaatacatgaagatgcagccgcgagtgctcgtcgccgtcgagcgtcagcacgccgctagctagtctccggcgaagggctgcagccacggcgggccagcggggaagcggcctctcgtcgctctcaacggtgacaccacggctacgcggattcgtcgcgcgccagacgccaccaccgtcgagctcgtcgtgcggggacgcagccgccatggggctcgtcgctgcaaagacgccacagccgtgagccgtctcaccgcattggggacacaaccgccatgcatagggctcgtcgaggtcacacgacgggtcactgcaggcttgcggctgacacactcagggacatggccatacatcgttggttcgtcgcggcacggggagggagacggccattgactccggcgggttaagtgggttatccgggtcccaaaccaacccgtgtgaaagggcaaaaacaggttgggttgggttgggttgggttggcgggttgagcctaacccaggaacaccctgagttcaatctattatatacttaaaaacccattaaacatcctaaaaatacttctgagtcgttacgtggcactcactacaccaaatcaggtcacctctgacaggcccaaaccctcacctttaacgggtttgaccctgattagagattagtggtcactgatgacacttacctttaaccggcggcggctcgtcagaggtgacagttacccctgacaggccagtattttccggcctgtcagagacgagggtctctccaagccttggggtggttgcaacttttcataggtgagacacttgtgacgggtccaaatgtgacagctcgtcacaggtgacccattcactgacgtatctatcttggcgcttgtcacaaatgactcacctttggctggctgaagtagcaaagcaatcacagatgaggtcacctgtgacggccttgtttatgacccatcagcgatgagttaattttgaaaaaaaaagtaatttcaaaaatattggctagcctcaggatttcctaaccacgccatctgaaaagcaaaaacattacagatttcaccaatatcacatattcccaaccaaaaagggaaaaatccattttacaccctctaacttttgtatttgtctaaaatacacccgtaattacaaaaccggatataaaacaccctctaactattaaaaccggacactttaacccctagagttatttttatggtggttttggtacacgtagatgccggctgtataaattatccacgtcagcggttataggccaaagccacatgtttctcccttcggcgggcggcagcggctaacacgctcgacggcaaggctctacaccatggtcgagagggaggaggaccaacccatcttcttccttcctctccctcctctttcttccttcccccctcccatcctgtaccttctcccttcaatctttttccaggagaacttgtcggagattcagagctctctcatatgcttcacatagctcagccaaggagggcaagctcgtcgccggctcgtattaccccgagcttggccaaaggtgcagactccgttgagctcgttgccgatccactcttctccttggccaaaggggcgggcttgccgtcaagctcggcgctgacgccaacaattcagtcaagacagattgttcatcttgcttgctgctactgttcttcgacacacaccatgctgctgtacatagaacattttgaaacacagcatgaaggtgcagaagtggttgatgaaagctcaaacaagtctctgcgacccaactgcttgctgctgcctcctccctgcgcggagctgctccttcccagcgccatcgatcgtttccgccggcgactgcgcgctgcacgcagctgcaccttctccgtgccgccccctctgccagctaacgccgccgctgactctggctagccacgcacgcggctgctggccgctgcacttcagcgcgccactgtgttagtcgccaccgctcgcaaggcaaaccccaaagggagaaacatctggctttgcccatataaccactaacgtgaagcatttatacagctggcatacacgtgtaccaaaaccaccataaaaacagcttaaggggttaaagtgtctggttttaatagttggagtatgtattattcaggggtgtattttagacaagcaccaaagttattaaagggtgcaaaatggacttttcccttccaaaaataacttcatttacatgcattccaagttgtcacaaaaattacatagacaaccaaattccgactgcacattcgtacccacattcgttttgagcccgtaaagccacaaacttacccaatttattgacttttcaaatgaagccgcaaacttatccaagttacttgtcgcctgtgccttttgaagaataatgatgacctgttattccaaaaaaaaacaaaaaagaggagaagataattgaacgatataatgtagtaaataatgagtacatttaaggcatagcaataaattttgaatttaggttgttcaaaatttgaagacaatttggaaaattaacttaaatatgacaatttgataaccaaggaactaactacatgtatatcctattaaagtacctcaaattataaaaaaaatttaatagaatacgagaacctcagggtgccaaggcgtgtcttgatcggttccaaactaacttaccctctaagaaatcatattctgtaatgattcgataaccaaggacctaactacactttacttgctaaataacagattgcatatatgaatattgtgatgatttgataaccaaggaactaactacatccatatcctattaaagtacctgaaattatccaaatatgacataatacgaggtactcctactacaaaagctcctaaactctaaactattacgtggcactctaataaatctatatacctaataaaaatattcgtaaagcttccgtgaggttttttcgtccgtccgcggtttcctgaacgcacacgcggtttttttttgccatccggtttttgcgtggttttctaacccggttttttttcgtcgttttttctgtcggtttttttgggccgtccggttttttcacggtttcctggcccggttttttcgttgattttttctgtccggtttttttcgcggttttctaccttgttttttttcggctgtttttttgggctgtccggttttttttaccgtggttttctttttttccatccgattgggttgaagcacaaatttagtgggatacaaatacatgactcagaaattacaaaggccaaatggagtcaggaacaattagatggcccaaaaacttgcatacagtacaatgatagaaattacataccgaattacatacagaatccaactattgaaattacatgcccaagtagaatacaaacatcttatcaacctatataaaaaactgaaatcacatatcacaaataagactcgtatgcacccaaaatttggtgtggataccgagcaatctctcgctcggcactaatatatgcccccaaatttgttatttttttcaaagtgagcaatttctggttcaacgtgatactaaatctacgtttatgatggtcgcaggtaattctttagcccttaatgatgcacatattaagaattgtatttattttttggcataacttttggaacaatcacaattgaatctggatattcaattattcgtatgctctcgtagactggaatttgtaaattattcttctacttcctgctcactaccttcccaccttttacctaaattattgagtaaattcagacaaaatcaattacatatagcaagcattagcagcaattatttttcactcttaacatacacacaaatgaaaaggttagaaccagattaattttttttagaatgatccaactttgcatcaactctgccaggtcaaatgtggtaggagcaagaacaactactccactatatgcaattctaatatgaaataaagacaaacagtggcatgcaaaatactcatacatatgcatcatgcatccatatcaagttgttctgagattgcttccatgattgcgcggtggcactcaaaatcacagctaactaagtgcagtttagaggtattatcaatgtttgcacaaatcagtatgataagtatcatttagtggttgaacatccacacccacataatagtatagatcttagtgtccacacaagctagaagtacttacttcagtacgagtagtagtatcatttagaggttgactatccatatgaccacatccactgaacagtacagaccatgaaacatcatgcaacacaaacaagcaggaaggagttgaagttgagagaccgtaaaacttacatatttccaactggcggcagcgcaaaacacctaccatatgcttctcctccactcccaaagttcatgtccgccattgaaaataaacttctacaggaatcaacataggaaaatgattagcacaataggataccattcaatgttggaatatcatattattgtcaaaataatgaagtgatctaatctcctgcagctcaataaaacgaacaaaaacagctgtaaaaatgtaagacatcaatcagtaatataattgagcaccacagagtagatcatcatgaaaaccttagaatgcccccagaaataaagggatagaaaggaaagcagaggccctcgtggaaagataaaagaaaatgaaaagcacagctggcttagacgaatagacagagtaggaccacgagaggtcattttttacgtaaggaataggctctaggaaagctgcctggaaaagtaggaatgaaagcagaatgcttaccggcttcgaaagataggactgcgagacttggacatgaaggagagttcccgctattccatagggatttgacagattctcatacaccaatatggccttctagccagaacagacacatcatgcagaccttctggtcagagagataaattacttgagaatcaagcaagaagcaccatatactagaaattgacttcttctaattatttaacataatgtaaactaattatttgtttttaccagtacataatctcctaatcaatatcttgctagataaatatactttgcatgctattcttttagatagaacatctaaaggtctcttctaattttgctatttttggttgagttttgatctcctgaactttgttaatgtttcaaaagttagtgttttgtcactataaacttgatggaattctgctttgtgatagaaccttgaaatctattatatatcatgtagatcagtcattctattcttaatggcctaaacttattgtgcacgcagagatcctcgcgttattgttttattatttaaatacattatgttttcttaactgtgaagctttttaattcatcgaaaagacatataagattacccatgtgtgtagagtctaaattacaatccacaggtaccacctaggtttatattcatctcaatattccataagtcgtagagctacaaaccaatgaaatcaaattaactaactgttctgtttttttttaaaaaaaactactcttatgcagtataaaaactactagaatacaaaagcaatcttaaaaaacatatatactggaaggtaagatataacttgtgcgtgtgtgtgtatgttgtgcagggaataaaaaatgaataacaggagttaaaagacttagaatgagatttactgatttaatttgcaatatcaacaattcaaattaagcatcggaaacttccgcgtacctgtcagacatcgtacgccgcaatcaaccatcaaacaccctataaacagcttctctctgcatagcagcatagtgcatatgcaattaggttgtccagcaaaaataagacaattactcagttacatactactgagaagtaataggaacaagcaaatactgaaaagtagcaaaggagcgagtcttgaggccacaaggagccttcattgtgttaccattcatcgggtcggtaacccatgttactatctggacagcaacatgaacagcacgtatgaggtgagtgagtttcactctaatgttttcaggtaatgcttgctcatagggaagaagaaggcactcatgtgatgtccagaattctgttgtcataatagggtgatccatagtgagtccatcagctgccatgaaccacaaagcctcatcaactcagtgagccaactccatgtacctgttcaacattgtacaagaaatgcagtggtcagcatatgcctgtggcttaaatgaattaaatgaatcaattcatctgagaaacattcaatgaagagttggagacagtttaagatcaagataaccacctgtcaccctgttcactatgctatgttccaaattaatcagcatggaaatatactggtgttcctcaattcccccatttcaaaaacagaattgctccaatgcaagacgatctcaagatttcacatgaacaacatgatatattatcttaaaaatgaaaattaccataggcggcagtggctggaactgacggcgaatcaaggacatcagtcactagcaggcacggggcaggcgagctctcgaactcggcgggccgcagccaggcctcgagagccgactggacgaccagaagaagcaccaacgggacgtcgagccggacattcgtccactgtaccagatcctgagaaatccaacaaaacaaacaccaatcagaccaaatagtgatcatggaggacatcacgagacaagaaaaacccaccggatccggcatccacgactcgctcagcctccccccgtcttcgaccactccttccgccgttcgagttttgttcaagattttgatgagaagtgttgtttgttcactttgtaaacactagttgatgcaataaagtcgagattcaatctacatcttcgagtttgtcatctaccagtgttgtttgggtcccgacggtgtaaccgcaggaaaggtggcagtctgaccagcgagagtgcggcggtctaaccacaagtgcacaggtggtctgaccagcgaagcaacggcggtctgaccggcgacaggtgggcggttcgaccgacggtgatagagctgcgccatctactctgcttgaggtaaatcttttattccgcaaaagattttgggttttttattttccctaccattcactcgcccctctaataggtttgtttgatcttgtttgtgcctacaagtggtatcagagccacgttcttgtttttaatctttgttgttctttagatctggtgctatggctaaaaagttttcaaacaaacctcacatcttcaatggagttaatttttattattggaagaaaaagatagaatcttacattacatctcaaggctatgatatttggttgaaagttgctattacttatgagattcttgctcaaaaaattgttgttcaaaaaactgattttgaaaataattgcaaaacacacaatataattctcaattcgatttctcgctccgattttgatcgtttttcgcatcttgctatagctactgagatttggaaaactttgaatgattttcgtactggatcttcaaacatcaaggagttgcgaaaagatgttttcaaaaatgactacatcaaatttgagatgaatcctggtgaatctttggatgactatttgggacgtctcgataaaatcttgagtaatcttagatctgttgatgcttcttatgatgttaattattctcaatctgaggttactcatcactttatgaatggtcttgatatgaaaatttcggatgttaaagtgacttctattcaggaatcggttgacatgaacaccttgactttggatattgtttacaccaaattaaaaatatatgagatgaatattcttttcaaaagaactgattctaaatctactgctttggtgtattcatctggatcttctttggatactactcttatgtctgttatttttgcttttaatgccttgtccaatgatcaactagaagaaatcagagaggaggacttggttttggttgcttggtggtatttcttaacgacattactataaatataattcccagcaagagcgtagaaatacttgtggtatattatggttatcgagttcatccgtaagcgcacggatataccattgtagcatttcacctgagagtattccaagggtatcgtatttattttatcccgtgggaagatcatgtagagagaacttgactaataatttatatattacttgtaataatcatagcctaagcagtggttaagataattcaagggtagagtgacacacaagcattaagctactcattctcataataaaatatctaagctaagtggaaagaaaagagaaagagaatctattcctatacttctagtatacataatatacatacattctagtcatctgatatactagctaataccctctatctgatgccctcctggtacttcgagaagccacccctaactgccgagttcctcacgacagcccatcaggaccatacacctggagctaaatacagaggagtaccctccctaggaaattaacttaggactatatacacgcgcggaggaatactcgtactgagctgtcactattagcggcccacctctcatccgcagcatataatcccaaataatgatatcccgtaatctagacaccacgtctaaactaccagatactactctaatatcatcgtcatgacatagagtaattgcataagcaaacattatacccgcaccaaagcatctcccagataagctagcagtatattcagtataacatgaacataatgtaaagtaggcattcatatactcggaaattatttcaataccataaatgtataaagaagagtattctaaataaagtacaaagcttataaaagaggaaaggaaagctactagagctatacccgaactcttccgaaggcttccggacttctgatttctactctattcctattccactagcttaagaacactaaactaacttgagagaatatgagagaggagaaaagctccttaaataggcaggtaatgacggttatggtggttggaatggttggtaataccctccaaccgctgtagggagtgaatctccaccgttccctcaaaaccctgcatccatcggcgctggcattggttcagccaaaccccctggttcggccaaaccctgggctggcccatccagcccacaagttggctggtggcctcctagacttctcctctccgtagacttgtgaattttggcctaattgatcgtgtcatttctgagttgttggcccattcatacataagtctcattctcgacatcgcccgattgatttatcgtctgagtttatgctgattctccttcactttatgtttattctctgcaaaaggttagtatacctaatactagtggaatattattattctaacatatatatgcattgcaagcataactagttctcctctatttcagtaatattgacggtcgaaactgatcgataacgacagtcaacattgctaacaaagcttctcaagctataagtaatgtcaaattcaggagaagaggacaaccaaaccacatttgttctcaatgttccaagcttggaagaggtacaaaggaggaagatcaagatgaatccaagaacgcctagcaaaataagaagcaattcaacaaaataagaacctaatcttagcaaaccaagtgatgtatttcttttcctacttattattttaatcttattaattttttttgtgtttcatattgttttaatataagccgtgtgttgttaatcaggtgtttaaaaatcaatatgattttcccttaaaattgtatatcgagtgactggtagctagtttaactaatgtaatttttacttgttaaatatatttaatttgggttttgaactatacaacaaaatctactgtatgcgcataaaaattgctatatgatttagatcatatagttgttaaattttattatcgtatgatatgttttctatcttatacatcatgaaaataggggagagagtgaacataggggagagagcgaacagaagggatcaagggaggatgggccaatacatgtatgtatgcaagtatggtagcatggtgtgtgtatgtacatgtacaggttagaaggggtggggcgtgggccttccaatttttcaatctttttgctaacataaatataaatataatggtaaaaagataatgggttcaccatgtttaaaggaaaacaatggttagattttttttctctaactagtaaaatgcacgtgcttcactacgggtaaaaagaacgtttaaatgtaataaatatttcaagaacggatataaaacactgtcgcattttgatatactcatattgttataacgcgctctctatcaactctcacatggcaagcgcatgatatcatttacaaaattgagatggtgcttggactgtaatatatcgtgttttgcggatgacggaaagaaaataattacttacttaaaattattgatttttgaattatccgttattattcgtatattgtctgtattatgcaccacacacaatatccgtggatcgcgtgttgcaacagataaaaactaaattaaatttgtgttgacgtaaaaattatactatatatcataattatgaaagctaatggcatagccaaattatgaaaatcagtgttattattttttcaatgggagtattgttttccatttataaatcacattgtcaaatatcgaaaaaaataagaagcagattagacgtagagaaaaaaaacagaaataaaaacaatggaagcagagtgacagggaggggataagaaagcagcagcagaacagtctcggacctctcggttcttccattctcaatttatctctatacacgatactttgttcttatcctcccatctcactctcttagacactggcagggacatgtaaaaaaaccactccccatcactttccccatttctcctcctgctcagctgctctcgatgaatccgccgtcttcctttttctgctctttcctcttggttttctctcctctcatctgctgctctccctcctcgaccacccaccgacggcgccgctccctctccgccggtccccctcctcgtccctccaccgagcccaccggtgatggatccaactcccccgaactcgctggcgatggatcggccttctctgagcttgccgacgacagatccacctcccccgagctcggtccagccgtcgtcggtgttgggtggcgaatcagtcgacgccgatagcagatcgagctccccaacggtggattgagctgccacaacggtgcagttcggtgccgagcggattggggcggctttggccctaactttctctcaactcaagtctctctaaaatcgatatcggaagaccacaccctctctctctctatttatacacgaggtaggctgtgcaaagcccatgaatctaacacaacttaggactctcaactacgtgggaaaccctctcttgcaagtatccaacttatgcctttccttatctctattaatcttcccgaatcaggactcctcgttccatacgtacataatccctcatttataccatatagattcttcatcaccacatgcattgttctctagcccgcatgacctcttaatccctggacatccacttctcccaagtcgactccgatctatcaccggcaacactttcccaagcctcaagcaacacctgcacatgcaacaactaagaagccatattccgagcacaagttcatcccaacctcactcacattagcataacaacaatatccatacgtatataaaccatctactagtcaaatccacgaaggaaacatccaaaaacgacaaaagacaaccctaaaccgacaatgattagaaatctgtcggtcaaaccgtggggctggtcggtctgaccgccacatgacctgcggtctgaccggcggcacccagtctgtatgaccgcctggggtcaaccgaactcagttacttcataaaatcaaccatctatataactccgaaatctcatcacaagaaaccaatcttttacatatagaatatcacaaaccaccaattttttcatcatttacagaattatcaatcgacttcagcttcaatcaatccttagtatcacgtctgattgtcttcctattgaaagtatctcatcttacggtcggaggcgtcagcccaaagagttcgacaatccaccaatcaaatttccgttaatcacagttgtgctccacctaagcttgcaccatgtcctatctcggacaatgtgtccatcctagcatggcctggggcacctctttcgtttctctatccttagttttccctccgtggctaggttctgacaccacttgctataaaatcggccttaatatatacctgaaatgccgaacacagaagaatgtcttaaaagatccaaagtgataacgacatgaagatatgatatttattaacgaggttgtaatgacctagaataattgaaggaaacaaaggactagagaaatgcaaaagcagcagctggttggcccaaccgacaagagcaagtagcagcggtagtggtgatgcagcgctgcaggctttagcgtagcaaacaaaagcagcagcaggtaccacctctccaattcgtgaagaaaggtagtaatttataaggtggtttgtccttcaccgattactctcgttcggactttttacggcaaacgagaacgaaaacctaaaatagttaaaacgttggtaacttgattatggtttaatctatctatctatctatctatctatctattatattattaaaatatttttgaaaggaggcatcacattcgctgtgggggctagaaattcccaaattaatcggagaaaaagaaaaggagattccatgtagaaatgcaatttaaaaatagctaaaattcggaattaaaaataagcaatattggaacaagtgtccatataagaacccaatacgagattaatcaaaattcgaaataaaaataaaataaaattcgaaattagaaaataaaaggagagtccaagtaggaatataatttaaaaataaatgaaattaggaagtaaaaataaggaatattgagataagagttcatataaaaccaaatacgagatttgttaatattcggaataaaaataaaaataaaatccataattagcaaaaagaaaagaagagttcaagtaggaatacaatttaaaattaactgaaatgtggaattaaaaataagcaaaatccatacacgaacctaatacgagattaattaaaattcagaaaaaagaatatcgaaaataaaaataaaagacagttcaagtagaaatacaattttgaaacaactgaaattcaaaataaaaaatataaatataaaaaagaacaatatacggtattaattaaaattttaaaaaaataaattccgaaattagaaaaaaaaaatttcaattaggaatacaatttataaataactaaaattggtgataaaaaataaagactatttgaaaaaaagaccatccaaaacatatgacgagataaattaagtaacaagcctataaaagagtagagtggtggcggttgatacgaaatataaaaactgttagtaaaacaccacatagaatcctaatgatgattaaaaggagggacgacaggcaggccgtgaagcaaacgggcaaggcggttgccgggacttatagaaagtaaaaaaaataaaccctattgataatcatattcgatttttaaaatctcaatgacaataaaaaggagaagtagcgggcggggtgtataggagtatagttgagaaccgccgatggttggcggtacttatagaaaataaaaaatgaattccaacgatagttacgttcgatgtttagaatctcaattataataaagagtaggcagcggatggtcgtatagtggcatcgtttgacgtgacttctaaaagttataaactctaaaaactacaatgtctaatttttaagggttcgaaacatctaaaaagtaaaaaaaaatctcaatgataatcatgttcgattttaaaatctccatgccaataaagaagggagaaagtgtgcgagctataaaggagtaaaatggcgaagccactgacggtttggcttacagaaagtaaaaaatgagctcgaacgataattatgtttgatttgtaaaatcccaatgacaaataaagagaaaagacagtggacgggccgtagaggagtataatggcagtgtttgacgggacttccagaaattataaaaataaaacccaacgagataataaactcaaaaaactataagattcaatttttaaaggcttcaaggagaatgaataaaaatagtagtagactgagcaagcaaataaagaaggatatgacagaagtaagggatagcagctggtgtgacttttaaaaactatataattagaaatacggggataatacggggatagctatttaataaattttaagtaaaaatcatactgaaaaatatatgattttgtttgggtgctagccgcgctattgcacgggccacccagctagtttaactaaatgagtcagacttttggatatggtttaactaaatgaatcagacctttatgtccgactacgtacacagactctaacatattttatttaaattaattattgatgctttttttaaaaatgtaaacggtggcctatctctatctctatctctattattataaaaattaaagatggttttgccggtattttggtacgtcatccgtaattgagtcggtttttaagattgtccgtttttttaaatacaaatctgtgtttgaattagattttaagttcgattgctttggaaatataaaaggagttgtataataaattttttaaagaaaaaactcacatgctaacttgagacgaaagtcggatttctaattacagctcatgattttctaaaaaaaatatatccaagcgaattccaacggtgaattttaccctagctataccgtataacaataataagattaaatagcatttacctgttacaatgcacgggcacttttctagtaatatataaaaaaagaaacatactttgatactcgagggtagtttaattacagctccatagcagagctctttcagtctgtagtattgaagaagtacgtggaaaaataacggatcgcttggcacagaacaggaagaaaatcaaacgcgatggaaacattttaaggtggtgccattgtgaacttctaaggaccggggctgtttgtttcatacagtaacattgccgttgccatagttttcttgtcaagcttgactagggttagacgaataaatttggcaccacactttggctagcaatctacaatattgccacactttgttacaaattgtctaatctctctctcggtagaactcgattcgaacagaataggaggaagaagacatagaaaagacttggagcaggggaagaagcagtagttgggaggattttgtgtaagttattcttcatcgatgcctctccccctctcacacttgcgtttatatactcacacaagtttacaggctcaggcccattccggcccagacactcgcacattcggcatgcgctctctagcagggcggatcctagacttaacaagattgagcgccattgtcgggtccgctacagtagtggtaacatccctcccttcttcagacgcggcttgtccccaagccggcgcatcggggaatcgttggcgaagtgcagctccatcttcccatgttacctcagaagaaggctgacctgacaaacgtatcttgagttgttccacagctctggctccccgtttggatgctcgacgagcaagaatttgaactggaatttcctcttcagcaggcagaactggcaaggctcgcaccggagagtcataagatggtggcgaagcctgacgaagctgagaaacatggactacaggatgaatagcacaatctgacgggagctgtaggtgatatgccactttgctcactttagccaagatatgaaaaggaccaaaatagcgaaacgctagcttgtgattggtgcgaccagccagagaaaactgagcatgaggctgtgccttaagaaacacccaatcgcctatctcaaaatcccgatcaaagcgccttttgttagcctgaaacttcattcgccttcttccagaagcaaatgttgccaaagcaagctggtaataacagtacgttccttcagccattcttccaaatccggaactgcacaagcaacaccgtcgaccacaccaaaatgtcgaggtgggtgaccatatagtacttcaaatggagacttatccaatgctgaatgaagcgtagtattgtaccaaaattctgccagagcaagccaacgcaaccatttctttgggcaagcatgaaagaagcaatggagaaaggtttcaagaaactgatttacccgctccgtttggccatcggtttaggggtgataagaagaactcatttgtaactgagtatcagccagccggaacagctccttctgcacagaactctggtaaatatgcgatcgcggtctgagatcaaatgctggggcagtccatgtagcttataaacattattcagataagcagggcaacatcaaatgcagtgaaaggatgtgctagagcgatgaagtgagcatatttactgaacttatccacaatcactagaatgcagtcaaaacctgacaacatcggcaaaccttccacaaaatccaatgaaatagtttgccaagcatggtctggaactggcagaggctggagcaaaccagggtatcgaactcgctctgccttggcttgtttacacactgaacactcagaaacaaactgtctgacagctttcctgatccctggccaagcaaacagccgattcaccctactgaaggttgcctgaatgccagaatgccccccaatagccgaacaatgtaagacagtcaacactttagtttgcaaagtggaattattacccaaccagattcgaccttgatagtataaaacaccatcctttaatgagtaatctggacaagtttcaggtgagagagaactttggtcagtaaaagagaagaagctggatcattggtatagcccaattgaacatctgctaaccattctggtatcccagaagaaacaacactaatctgacaaacttcttcagagtgacaacgggatagagcatcggctgccttattctccaaacccttcttatataccagtttaaactgtaacccaagcaattttgtcatcgcacgctgttgccagggggttgccagacgttgatcatcaagatgaacgagactacgttgatcagttcgaataataaactcaccaaactgcaaatatgatcgccagcgatcgaccgcaagtaagatggccaagtactccttctcataggtagataatcctctgttgcaaggccccaaagatttgctaaggaaagccagcggatgccctgcctgcataagaacagcaccaacccctttatcagaagcatcggtctcgatttcaaacacctttgagaaatctagcaacgctaagactggggcagtagtaagagcttccttaagtgcttcaaatgctgcctgatgttctgaagtccacacaaacacaaaattcttcttcaataaatcagtaagaggtcgactgattatcccaaaagagcgcacaaactttcggtagtagcctgccagtcccaaaaatccacgaacttctttcacattactaggaactgaccaagaacgaacaacccgaatgttctttggatcagtggacacccccgctgcactgatcacatgccccaaataagtcaaactggcacaagcaaaagaacatttactgcgcttaactttgagttggtgatcagtgagtagctgaaacacctgccgcaacagtgagatgatcttgcagattcttactatacaccaaaatgtcatcaataaaaaccaaaactcccttcctaagtagaggtgccagaatctgattcatcaacccgtgaaatgttgctggggcgcccgtaagaccatagggcatcacacgaaactcatagtgaccattgtgagttttgaaagtgatcttgtgttcatcttcagaactcattcggatttggtgataccccgctctcaaatccaaactggtaaacaaagtagaaccagctagctcgtcaaggagttcatcaatgataggaagggggtaacgattcttaacagtaattgcattcaaatgtctgtagtcgatgcaaaagcgccaagtcagatctttctttaacaccaaaagtactggtgaagagaagggactagaactgggttgaatcactccttgtggcaacatttcagttacttgtttttcaatctcgtccttttgggctagattgtaatggtaaggacgcaaattgacaggcttagctcctggcagtaaaggaattgcatgatcaaatattctggatggtggtaacccctttggttcatcaaagatgtgagcaaactcatctaggagctgagtaccagcagctggtagaggttcagaattttcagtttcagtcaccaaaagagcagagttcaaccacctgcatgactgcatctcgatgaatcaatccttgaacctgattagctgtgagtgtgacacaagaacgagtattggccctcactcccttcagacaaacctcaacttgttggtactgaaattttagtgtttttgctcgccaatctatctgcattgggctatgttgctcaacccaatccatgccgagaatcacatcatagcttccaagaggtagaaccttcaggttattctggaatgatactgtaacatacctgaattctaggattaaggaatttccatcaaaactagttgaaagggaagttcttcaattttgtaaaccaaaaatttccattttaaacctaggtgaagttgatctaactcttgcatgataaaattttagaacaaattaaaaacctttgcatctctaacctaggacaaaaatataaatttatgtgtaagcatgcatactctcatagacatgtttgacttgagtccttcatatgcatttggatttggattgcattcggattttcgatttgcatatcataataggtctcatgaatattaactaagatctagataaacaactgaaccattagggcctagtgctagctagaggaagttaaaataggaaccatacaccttaaaatatatcaacaaggccaatgccaagccccacaaaactattttagtcatccatctgaagactagtcatgaacatggaagtgaccaaataaattatatcatataggatatattctatcttaatcatctctataagcattctcttaatttaatactaaagtaaacttgtgcataataggtaaggagcttatgacctgtgtaaggtaaactgaaattctaacatatcattatcacctcaggttaatgagagtccaaatataacttttataaacatttacatgcatttaggaaagggaaacacatataagacataaatcttgagaattatctaaaataattcgtgcaagataaaatcatgggaaaattcatgtaggctctactcaacacatacaactcactgtaattttggtatgatttaataactaaatttgtacctcaaataaatcagtcaaactaataaaaactagattaactgtagttcttaatcggctaaaaccatactttatctaaaagtgcatttaactgcatagaagtgtataagtaaaataatttattcaaatactaggtcatttatcattaataaaaataattttttcagaatttatcttctctgtttagggctcctaaaaattcgaactagtttccaaagaacccatattcctctaatttctgtgagtaatctatccataatttttgagtgcaaccaaagaaaatagaaactaggtacatacacctacctccagtaaaatcaacactagttaatctgatcaacacattaagtattgaagctacaaaattagagaaaataattccggaaattcgtccaaaaaccaagctcacccatgtttctgcctacacatctctcttccacctagtttacttcgacctgggccccccttgtcagtccctccggcttgcccttcctctgtgcaacttccctagccgaccgagaaacactgagagggagagatcgagcgccgaccggctctagacgccgcacgacgcgtggccacgacgtgtcgacgccctaaaaacgccgagctccatttctgcctctcccagacgcgtcgccactcttcacccaccattccagtgccgatccatccgagggagagcatcctcgctgctcttctccactggttctccatcgccggctgcgaagaagacgatggccgcaatcgttgatgagccgcggtcgtttcctcttctcttgcgttccatactctcctcaccatgccgaatatttctccttttgatttcatcctctctggtgcatccaatcggcgggaacgctgccatgcacaccggagctctggagcgcgctctgcgcaccgccgcagcaacatcgtcgccgttgccatcaatctagatcaagccggagcgagccaccacgccaccagcttcacctcaacctcctctccatttcccctcaagaatcttgaagaatggtgctacgagtgtggagatcgtccaccgtcttctccacctccggtcgccgtcgccattgtcgattccgcctcctccggtgagccattgtccgattcttcgcgtatacaccatccctgggacctcactaaccccatgaaaacacatgcatgtcaattcgatgagtggatcgagccgttgccgtcttcccggagctctacaccgtcgccggaccatcttcttctccgctgccgctgtccagactttccggcgcctcgttcaaggttcggtgagcacccttgagcccataggattgcattcatgcatttcattcacttagaattgagcaccaactcaacatgcagtagcagcctaagcacagccgccgctcggactcgccgccggcgttactccgatgtccactgaccaagaaaagaagaggaatggaatcgcaatagcatgatcttcattttgtcttttggtcgcaccctcaaacgagccaccgtttgccgctggcaagcttgagatcgagctcagccatggcttgatctgcttcagctcgaaccagggacctcgtcacaagaatttaggttaatgtagggctctttatgcaaaatctcaagacacacagaacagtcataggactgcggattgatttcctgaaactataggagcctttttgcatattggcctgagactgacagtgcaccccttggaaacaaaatctgaaattataaaagaacagtaactaaaacttgtaaaaatccatataaaattaaatatagctcattttaagatgattcaaatttctgtgaactcaccaaattgggaactttgatgttatgaaataaaaacttgcactcacagtacaaatttagcctctaaaatttatccaagttaaatcacacataaagcacgcacaaaatttataaaatgcatacaaaattcatttcaactcattttggagcaaactcagtttctacagatccaccaacttatgttctcctataaagcaaaatgaaatagtatacatactatacatcaaatgcctctaaaactattacctttaaatgactagttttagataagctgaattttagaagttcatataaaattcatcttagatctttttttagtaaacccaagttctgtagaatcaccaaaacatatacttccaaattataaaataaaattatatacttactgtatgataaaagcctctaaatacttatgtaagtaataaccatcatagagcaaccttaaattgtaaaatttgtagaaaattcatctttagtctaaatgaagtgaaccaaatatctatagaaccagcaaacagtgggcttcaacatagtaaaataaaatatgaaaccttctgtacaggttatagctctaaactttaaatttataggataggtgctaatcacatagtatcgattgagcaatatgtatatatataaatgtatatagaaatacactctagctataatgaaactcaaataaaacttgttagaccagtgaatgcatagttccattcccatccaccaaaacttaaggcacttagctcatataataatttctaggttgatataataaattgctaacatggactagagctcccctagtttataaaatatgaaccatgataataaagaccataagcctatgaactaaggttagattagttaactaaaatactcattttatacatcactagctagatgaggcaagttctagacctaaacctctaaagccatgaacctatagaacactatacacctataacacgttataacttgtaaaatacataaagaattcatattaactctaaaaattatgaaaccaaatgtgttagtgttagaaaacacatatcttcaccccagcaaacataaacttaataagaattaccttacaacagcatttcacaacagtaactaagtaaatcctacactataccgacgaaacttctaaaattcataactcccaaataaaatgagataaaatagaaattctttcacctaaattaattttagaccagtacctattcactgtgcacaaatcatccattttagagcattttggatttttcgcatatttcggtgtttaattgcataacgtgtactttgtatagatgattgcttaaacggtgaagaagtgatttaggtgctgacattttcctgattcaaggcaagtcccacctccatctctttgatcactttgaacctatgttttggaggttattgaaaatgtttgcaaatcttgcatgtcgattgtacactaataaattaaaattttgttaaacttgttagacaaactcctattgtttgcattcaccttgaccccacatatatccatatccctcattcctaaccttaggaacaatatgactataccactttatatatgaattttggagtcactaggttactataatgcttagccatgcttagaatggtctaccttgtcattatgggctcattacaaatatgaaaaattgattttgaaataatctggacagaactttaatacttgtgattttgataaataaaatgatggaaaacatggattttaggtttgggcctcaagtggtgcacatatggtgattagttgtgtaccgatagggggagagtgtgcccaaaccgacctaaggacttcactcaatgtcagttcatttcgtatacagtgcaaccacatgtgctagtatgggatagcccaagcttagtaaattatttatggtttagccttacattctggtaggccggtgtgtatgagttcgtataattcagaggagcttcctatttaccccgaagtggtagtttaggtgactaagcgtgtccaatacaacagtattgtgccacgtggtgggttcccgttgtgtccgccaccacggcgttaagtttaaggcgtgggcccgccacttaacggttctaggtcatataacgtgtatggcttaggatggagtaacacgtatcgtgctggtgtagggctaaatcatgaattttggaaaagctttgttgcgggtaataaatcgggtacttatgtatcgcgtgacatgctcttgcatgattattatttcgcatcatgtgggtaaagtgtacaaactctgcagagttaaaactaatcgattagccgtgctcgcggtcatgagcggcgtgtggatatgtattgagtatagacttgtgtttattcttctaaatgctgaaatttaccttcaaattgtgatgagatttgagaatgatctccttgctgccatggaaggcaatgaggtgcatatttatacatgattaatgcctaccttgatgcccaatatgtcaaatactagcttgctgaaattttatttgaaagtaaacctgatttagaaatgttttatgcaaataaaacttgctttatgctaaaaagaaccatattatgccttccttgattatatgccttgcaagtagggtcttaggcttgtcttggtgcttgccagtacattatttctaataatgtactgactcttgctattgaattaaccttttgcttgcaggttttagatttagtctttgagtgatgcgggtaatcgactgcttcttctaggacttgaacttaatggggtaaacccctagtcggtgtgcttgtggattgagtagacaagcttccgctgttctatatatttatttggccagttggccaatgtaactaaagtagatgtagtttataatcgctttcatcttatttgtgtttgctatgtataatcatgcttgagatgaaagtgtgaatctagtgcacatcctgggaactagattcacatgagtatgagttaagaatatttgagatgttgtagatctttagccatttttgtcaagtctcctgaatgtgtaacacatctggtcaccgccttcgagtggtttgacgggcacatctcaggctgaagttgactggcaggctaaaggcccggcaatgtctccaatattcctctctcgaggcgtcggatatttcattatacttgtttgatgacttgaattatacatttcatctctcaattataatggaaggtccggagagcctacgacagataccccttgaactaaccacaggcaatcaattctctgctacattgcaaaatacccccatcaacaattctcacccgaatagaaggtacagacctctgtgtagtacccaatttgtcagccatttcctcagatatgaaactgtgagaacttccagaatcaacaagcatcatcacctcatgatgagtaattaatccttgcaaacgcaaagtaccagaggactctgttccaagcattgcctcctttgaaatctgctagacttcactgatttggtcaggttcagtgtcacaatcgtcttcagtttcatctggcacatttctgtcatcagattcatccaacaattctaatagttctcccaccacatgtaactgaacagtgggtccacatttgtgctcactgctccacttctcaccacacttgtgacataaacccttagccttgcgataagcccgcagagcagcaacccgatcttctatcggctgcattttgtcatcagtccgcccaccattgcctctaggacgctgtccagctcggtctactaccacagcttcaacccatcgcagttcacagcgtcccgtagcaagcacttcttcctgtaaacaggcaagatccacgacagtatccatgtcggcaggactatgtaacaagactgccgaacgaatttcaggtttcaacccgtcaaggaattcagtgacaaaaaacactagattccaggacgagtgatgaacataaagttggtgcatcaattcattaaacttctccgcatagctaagcaccgacccaatttgtctaaccctattaaattgcctaatcaaactctggaactcctctctcccaaacttagcacaaactgcttcagcaaactcgctccaactcatcaattcaacatgtgcattagtggattgaagccaagtaagcgccccacctatgaattgcaacgcagcgacacctacccaaacttctggactaactccactaacccggaaatatgtttcacacttcatcttccacgctcggggattttctccatcaaattgtgggcaatcaactccaacccctcccccatgaaaaacggaagcaaaactccgactcgaactctccccaaattcaaaaggaatccgagacgcaaatggagttcgaaacgtacccttggccgggatagacgcaggagaggactcctccccacatgccttccgccgattcgtcgttgcaacgccgcggcctaacggcccgtgaccaatgtcactctcgcttgccgaacgctcgtccttcgccactgcggttagcggcttcgtcggcttggggagaatagtcggcaacttggacggcttgacgacgagcaccggattgcgagacagccgctccacttgctgcgcagttcaccgagatcttcccgaaggtcggtcatggcctgatccaccgctggtttccagctggtcaactccaccaccatgggcttgatttcttccaaggatccaaccgaggcttggatggcagagttctgcttctgaatcattgccatggccaccgtgagttccgccagctgttgctccatttcctgcgacttgagttgcgcccgagaatgatagcgtggtttgtcaaggtaatctaggattggtagctctgatacctattgttacgaattgtctaatctctctctcagtagaactcaatctgttggattcgaacagaataggaggaagaagacagataaaagacttggcgcaggggaagaagcagtagttgggaggaatttgtcttagttattcttcatcgatgcctctccccctctcacacttgcgcttacatactcgcacaagtttacaggctcaggcccattccggcccagacactcgcacattcggccttcgctctctagcacggcggatcctagacttaacaggattcagcgccattgtcgggtccgctacagtagtggtaacacacttttatgagacaatgacatgtgggaccaaagtgctagaaaaagaatcctaccataagtgtgacaatgaaccaaacgcattgctaacttagtcaaagctgcttaagttgaggtgtggcaaagtgtggcaccatgtggtcacgaaccaaacaacccctaatactcgccatccaagaaggccagaagggtgaaagatcgataccgtggtttagggtgtgtttggttgagctgtggcttttgaaaaagtagctgtgggctgtggctttttaaaaagtagctgttgaatatgggctgtgacttttagaaaagctcgtttggttcaacaactgtggcttttggaataatagtcctgctgacaagcaggccccacatgtcatacatgttggaaaataaaataaagagatggaggagatggccatggccatcgccgtcggcctcgggcgggggcggcggggaggcagctcggcgaggagagcgaaggcggcagttcggcgaggaggacgcgcggcggggacgagcggcgatggcggggaggcagctcggtgaggaggagtggcggcagcggttcggcaaggaggaggacgcgcagcggggaggagcggcggcgtggaggagcgcccccttcggccacctcacctccttcgtatcccgcatccacaatcgacgggcgaaggggcggcggcaccgggaggaggaggcagcagtgacgccgccgccgtctcgtcgcgcgacgcgagcagagcaggcgagatctcgtcgacgaggtggttgtcatcgtcgacgaaggcgaccgcggtctccgtagcgatggcgcagcggaggaggggcacggcggacagggctgcctcgtggggacgcaccgtgaggtcgtcagcgtgcacaaggccgagggaggagacggagcggcctccggcgatgtccttcggcgacagcggtggcagattggagggggaaacacggcggtggcagcaggtcctctccccgtgggcagcggcgatgggggaggagctcgccgggaggtcgccgcttcgccgcctcgccgagaggtcgccgcgtcggacgaggaggagaaggggcggggaggagtaggggcggcaccggcgtcaggcgggaggcggcactagcgtgaagaagatgcgaggagatggggaaaagatcgaaccgttttcttcataatggtagaggtgggtaatttttttccccaaaaaagaaggtgaaagtagggggtaggggtgcttttggtttgtactacatcaaaaactagcttttgacaaaatcagctgtggcttttgggccttttggttgggttttggcttttgcaaaagcaaaagcaggttgaaaagtccaaccaaacacacccttagtcgtgtggtatcccggtttatgcgacgagtaactaattaattaacacacaggacgagggcagcacatgggacgcctagaaggcgtgcaactaatagtctgatactgccggcagagggaggctcctgagaggagaatacaatacaaataagcaatatataggacctcgatagctgtgtggcaactagcatgtcggggctgcgagtatagatggccaaaaggcccgaggcccgacggcccggcccatggcacggtattttggcccggcccaagcacggcacggcccgacggaggtcgggcccatgtcggcccggcccgaccaccaggccgtgcctaggcccctccaccggcacattggcccgcccggcacggccgggccggcccggcacgatgggccggcaactaggcccgatacacaaaaaaaaaataggggagtaaaaatagacatattatatgccatggacgaaagaattgggatttaaaattgactttttttatctatacatatgtcagccaaagaggagggatagaaaatagacttattttagctatacatacgtcagcccaaagaggagggaaggaaaataaacttattttagctatacatatgaaatagcccaaagaggagggatgaaaaatagacttattttaaaaaaggcccgatgagccacccatgccttcgggccggcacggcacggccggacagctggtgggccgtgcctgggcgggaggtgcagcccatgagccggcacggccgggccgggccggcctgatggctgctgggccgtgcccagccgtgcctgggccgggctgtaccgggtgggccctttggccatctatagctgcgagatgcaagtctctcagattccaatccggcggattggttacctgggtgaagggaggaaagtgaccagagggaagtggtagtgagggtgaggctaaactagttgtgggtgcttgggtcctgcggggttgatggttttggggaggtggggggaggcggagagctatccttttaagtataaaacgaaggtcacccctgttgtgcagacccctaccaaactcgtgcattctgcatcctgcttgcccaaacaacctgcaggttagagaaaatggatcaggccgctggaggatggcatggtactcagcgttgggcagctgctcggcgaggagtatcgccagctccgcggggtcggcggcgaggtcgctcagctgcgcgacgagctggccaccatgaacgccctcctccgcatgcagtcggaggccggcgagggcgccgtggaccacttcgtacgggagtggatgaggcaggtctgcgaggtcgcctacgacgccgaggactgcatcgacctctacttctgccgctgccgcgtcaggttgcagctgagtgacggcgtgctcagctgggccaggcacctggcctccacgctctttccgcggcgccgcctcgccggtgacatcaaggctctccgcgcccgggcgatcgagatcagcgagcgccacgcccggtacggcgtcaaccgcgaggaacttcgcggctggactgtgtctgctgctgctctggtccccgcgacagcggcggctttccacccagctgcctgtggctctgaccagttggtcggcatcgagggccaggctaacacactggcggacaagctgaaggcggtggacgaaagcagcaatctgaaggtgttctccatcgtgggcttcggggggctagggaagacgacgctggccatggaggtgtgccggaagctggagtcggtgttccagcgtcaggccatggtgtcggtgtcccaggcgttcgacgccagcaaggacctgcaggtactccttaagcgcatcattctgcagattatcaaaccgaaaaagagtaacgagaacagtatcaacgaagagcagtccaccggtgacatcgacagcatggatgtgagcacgctgttccaaaagctggaagtgagtctcactggaatgaggtacgaaaaacatatgtacaactattttaaatgcatatactatatatatattcattaacgataatgaccagatggattatggttatttttgttattttattattttgtcaacaataaaagaagaaatttggagggagagacgtcctccaaacatttttaagaaaaatttgttatcatgttgagaatttaacataggaccttgaaataaaaccacactccttaccactggccactgccctgcatctcaacaatatataacaacaacaaccttttgtccatactaccctcattggcatgaccgaatagtctcattacaaaactctaagagcaattttaaagttcttgaggagatattatgaggtaccattttttctattttaaagtttttggtaactagatactatgacgtaccaaattttacactaaattttgagcaattctaccatccttaaggaggtatcatgaggtactaaaaatttagtgcaaaatttggtacctcatagtacttaggtaccaagagatacgaaatttatagtagaaaaagtggtacctcatggtacctcctcaaggactgtaaaattactctatttttacatattctccatctgtttttgattgaccagcatttaattatttgtttttgcattcaaaatttcgttcttaattctagaagatttacaatggaacctgtaggtacctcattgtgatcgacgacgtctggtccacatcagcatggaatgcaatccaatcaaaattgccagagaacaattgtggcagcataatcatggtaaccactcgggtagaaactgtggccaaagcaagcagttcaccgagtgtttctggagattatatgcacaagatcaatcccctaggtgaaaaggatgcagagaagctgttcgtgagcagagcatttggctacaaggagtcatgctgccccgaggatctgaaggaacaaatgaagagtattcttaaaaaatgtgccaggctgccattagccattgttagcatcgccggcctcctatcaagctacagatcatcgtcatcagggagcataaggatgtggcagagaatttctaactccattggttctcagatggagatacacccaactctagaggggatgaagcagataattgcacttagctacaaccacttgccccatcatctcaaggcttgcatgttgtatcttagcatttttccagaggattatgtgaccaagaagaagcggctgctgctcagatggatcgcggaaggctttgtcatggagaaacggggattgaccatgttcgaggttgcagaatcttactatgacgagctcgtaagcaggagtttgattgatgcagttagggtccgtttggatggaaccgtgaaggcggtgaaggtgcatgatatgatgctggaggtcatagtgtccaagtccctggagaactttgtcaactttttaggagcccaatacggcggagggacaccatcctacgacagcgtccgccgcctcgccatccatggagacggaggccccaagcatgtcgtggatgtgatgagcgcaacacacgtccggtcgcttagcacgtttggggctcaagggaatattgcagtgctccatcgcctcgcagagttcaccctgctcaaggtgcttgacctagaagactgcaaggaggtgaaagactgccatgtcaagtatatctgccggttgtttctacttaggtttctgagcttgaggaacactgatgtgagcaccatttctagccagatcagcaggctgcaacatttgcaaacgctcaacttatatggcacccgcatcgaaaatctcccaacatcggtgactatgctagagagacttgaatatctcttcttctctgagaggtggtcgatgcgtcgctgggaaattcccgttgggctgaagaaaatgatggcattgtgcacgctgagaacgatacgcctcccgaatgacccgaatgttgtcaaagaaataggtgccctggcacagctgcagactctcgatatcaccattctcaactccagcgaggaggtccttgcaaatctggccgatgcgctagataagaccaacaacctccggtcgctctacgcctacggtacaggaaaagatgagcacaaggataggttgctaaacttcctcctccgcctcaagacgccgccgcttctcctcgagagcgtgaggatcgacggggtcatggaccaactgcccaagtggttcaattcactggtacatctcgtcaagatgtatacatggagggtcagccttacgggtgaccatctcttggcgtcttgtgcgagctgcctaacctggcgagcgtttcccttgggtatgacagctgcactgatgatgagctgcttgtacgttccgccttcaaattccctgcactcaaaagcttttatgtggacccttacattatgccgagagctatccgatttgagaagtcaaccatggaaaaaatcgagaccttcagagtgtttttctatgacaatgatgggactgggagaccgatccttgccggcattgagaacttgacaagcctcaagaagctggaagtgctcacccatagcataaatgctgagatcgagattctggaatggctcaaagttgagagagccaggcaccaagtttgaggttgcagtgaaatacctctggtgacatgcatgtttactatacctcttgttttaatttgtttccagctcctgagctccaactttcacatggtttttttcatgttattttccgtataataaattcgtactttctgtttcacatggatgacacctctttacaatttataaagcttgtgctgcatactcgtacatattgtttcgtggcagctcagaaaccaggaaaaaattcttaggaaacaagagattaaattgctttgagactgttgctgcctacgtttcaaaagtccagcaatgggcctcacgacatgtggtgcaggtatatggccccatcccttccacagaactagcatggtggctcgtgcagattgcgcggctagcactattataaaattctcatatagtagcatatatgatgagggatgtaggtcctgatcttctgataggtattgataaacaatcgatttgggcggagtcgtgacacaactcgatccggcttctgaacgaacatgctactgagccccgcaatcgcagcaccatgtctcctttggttgtcaaccgtgccgaaacccggttgacctcgtcaagaaggctaatccctgcatgcgaatcgaagaacacaagcaagaacaagatagattgcaaccaaattgcatatgaatgattaagcactcgaatttgaggttccacaaaccgatctagcggcgaaactgttcttgacaaaataatctaagcaaaacccaattctaaacgatgacggctactgaattaatatgattagggacgtcctagggttgccctagggcgcacaccccattgggctaagcccacgacacaattacaaagcccaaaactcaaaatcagattcggacaggatgagatacgtggcttgttttgcagattcccggcagctcggtaggaattttgatgtgggaccaaaaccatctgaaagtagacttcataagatttccaacaagtactcatgggccgcaaaattccttctagatcagcggctaggtccgtttgaaattgatgctgtcaggaggcccgaatccgaatccaaaacgtgtagaactttatctcttgtcttttatgaaccaaaagtgacgtggtgaggtagaaatagacttggagaaggtcttggtttggtccccaatcaacttctttaatcatccatgcattagttacgctcggtctcttttccttcgcccaagcaagtacctctgcaaacaaaaacacacgaaactcattatgtagcaacgtttgttcaaatatataacatgtaaatctaatatagattttatgcacctttggttgattaatacataaggtagtcatggttatatccgagctagttatgtcctcatcatcctccccttcttgattggaaaccgttctcggtttcaccttgtcgtggagcgtattgcacttatctttgtctatcacaacattctgcgcggaacatttcttgatggccatatgattggatcctaaaatctttgtagtcgaaaaaccacaacactccccttcttgcaaaccaacctgtaactcatttaaacaactagaggaactagatagagaattacttatatgcatgcggtcctctagacaatacatttcatcatgaaaaggaggtatagtcaaattcgaacaaatatatactcgatgcacattatattctcctttactatcataattgccaataatatgaaaaatcacatcagaagggcatggcaattcaaacctagcaaataatttcttctctaaacagttgagtggacaaagatcatcaaattgaatataaccccaagtatttaaagaagatagcaatttaagctcttcattctcgctagcaatgtgaataacatgtttaaactcaatacatagtggccctactatagaactaacatgttcagtcactagttgtggcatggatataagtgaagcattgcacaactcttcttcatcacaagaaacatcaagcaaattgttttgtgacaaaggtatttcaacaattgtttccactatgggttgctctaacgtagcataagtagtggacatagttggcacatcataactatgcataccttgagtagttataacaccattttcattacttgcttggtcaatggcacattcttccaacatgcatagagctatagatagatctttttcctcttcgtctttcttctctttctcattaccttagttgttctcaaatgcctgcaaaacattagtatccaaaacaataggcacagcaatacgttcgttttgtaattcagacttagttgaagacatcacaatagcatctttcctggtatctctaaaaatctcatcgattccattcttcatcctttgaagattatcttcaaaaatttcagtaaaactcatgggtaccaatttcattttccgacaattatatctaaatgtgtatgtgttagcaacaaaattatgcgatccattattatcatatacccatggttgaccaaacaacaaagaacatgcttgcatagggacaagatcaaaattggcagtatcatggtaatttccaattgaaaaatttattctcacaattctatttaccttgaacttaccacaagagttgaaccatttgatgtaatatagatgaggatgcggttgtgtaagcaactcaagtttctcaaccaaatctgaactcacaaagttattacaactctcactatcgattatagtacgacatgctctatccttaaccacaaactttgtttcaaataaatcatggtactgccattgctccgctttctccatttgagaacttagcacttgttgcaccaaagtactgtcatcacgtgcaccttgttggtatcgctgatttcgagcgccactcatacctgtcaatgcaaacacaaaaacaacaacaaacaatgaaggttatccctaataatctgctatgcggtgtagtggtacctctcaacaactcagccaaatggagcaccttaccaagctcttacaagtgtcttactagcaatgctaaggacggtacaacggtggctggttcatgacaccttgaaggacgtgatgtggcgattgcaaggatcaaagcggtgctgaccagaagtatatatgtggagcttgggaggcacaatatatagtagcaaaggaacgcaattatgctaatcagaaaatgcaaagttgaataatagttcaaagtactagtcaatgtgctggcctagcctagactcaactctagctcaagcaagcacccgacaacactaaggactagatatgaatcaatacacaactctgcactctgaaaacatactcaaaagatgaatgatttttttttctttcttagtgcagctttttttaagcacctttctgccttttttttcttttttttaggtgcggcttttttttctttttttttctttgcacctttctaccttttctttctttctttattcttttttttacttttttttcaacaaaaactgaccactgacctcgaaaagggactcaaatgtaaatataaatattacagggactcaaacgcaaagtgcaaaactaaaattggatcatctcaaaaatggattgctcatatcatgtaggttccgtttttataaaaatatcttaaatccgctacttaacaattctataaagaggaatatacggacagtcacggatatatctctcctcacgtgcacacagtactcccctcacgcgcacagtacggcaactccaaaaccatttgataaaaatttctccaaatcacaaaaacagaaacccgacgatgagacgattcaattcaaggtcccggcaacaactaacgagataaaaaactggacccaaaactgacgtacaactcacacacttgagtaatgaaccctagacctaagtgatgaacagatgcaatactcaaaactaaaaattaaatctaaaactaaaccagcactcgacacgacgatgcaatctagaattcaacaaagcaaaatctaatagaacaatgcaacggctcaaattgtctaggtaaggaataattttttttgtttggtaattttctgtttatgggaagataaattacctaacgggcaaccgcgctctgataccaactgatgagggatgtaggtcccgatcttccaataggtattgataaacagtcgatttgggcggagtcacgacacaactcgatccggcttctgaacgaacacgctactgagccccgcaatcgcagcaccacgtctcctctggttgtcagctgtgccgaaacccggttgacctcgccgagaaggctaatccctgcatgcgaatcgaagaacacaagcaagaacaagatagattgcaaccaaattgcatatgaatgattaagcactcgaatttggggttccacaaaccgatctagccgcgaaattgttcttgacaaaataatctaagcaaaacccaactctaaacgatgacggctactgaattaatatgattagggacgtcctagggttgccctagggcgcacaccccattggtctaagcccacgacacaattacaaagcccaaaactcaaaatcaaattcggactggatgagatacgtggcttattttgcagattcccggcagctcggtaggaattttgacgtgggaccaaaaccatctgaaagtagacttcataagatttccaacaagtactcatgggctccaaaattccttctagatcagcagctagttccatttgaagttgatgctgtcaggaggcccgaattcgaatccaaaacgtgtagaactttatctcttgtcttctatggaccaaaagtgacgtggtgaagtagaaatagacttggagaaggtcttggtttggtccccaatcaacttctttaatcgtccatgcattagttacgctcggtctcttttccttcgcccaagcaagtacctctgcaaacaaaaacacacgaaactcataatgtagcaacgtttgttcaaatatataacatgtaaatctaatatagaacatatacacctttggttgattaatacataaggtagtcatggttatatccgagctagttatgtcctcatcaatatatgttttcatattttattacaaaatgtattaaaaaataacaacataaattgtatttctacatggagtattttcttgatattaattattttctaatttaatctgattttagattttctttttataaattatatttttacatgtactcttatttcaatattcagtccaaatttcatattttttaaaaaaatgttttttgtatggactcaccttttatttgtttttacttttttatctgaatatcataaattttaaaaatatgactctattttttatttttaactaattaatgtgtgaatttctaggccatgagagcaaacgtggtgatttgtttttttattatctaatttgttgatgaaactaattttggcgagacgattttccgcatgccagctattattgttttgtgtatttgtattttgctttggttgctaagactgtgttttttttacattgatgtagtgagtacaatatggaacagagacatgcatggttctgtttctgtttttgattggtttcactttgatggaccatgtatgacagttgttttttaaattaaaataatatttccaaattgaataaagaatcctaatgtactacgtaggcagggtgtccgattgattttttctctcttcttgctgttaatgtaataccgtttcagattgtcttttactttttttcttattttctttcaattaatataggattttctaggccataagagcggagacttcttgtctcactttgatagaccatgtatgacggttgttttccaaattaaaataatgtttccaaattgaataaagaatcctaatgtactacgtaggcagggtgtccgattgattttttttgtttttcttttttttttgttaatgtgataccgtctcatattgccttttattttttttttcttattttccttcaattaatgtgggattttctagatcatgggagctaatgtggaggcttctttttctttcaattaatataggattttctaggccatgagagcggaggcttcttgtctcactttgatagactatgtatgacggttgtttttcaaattaaaataatgtttccaaattgaataaagaatcctaatatactacgtaggcagggtgtccgattgattttttttgtttttctttttcttttgttgttaatgtgataccatctcatattgccttttattttttttcttattttccttcaattaatgtgggattttctagatcatgagagctactcccccgtccttaaaaataataaaccctggtttccgtgcctaatgtttgaccgtccgtcttatttgaaaaaattataaaaaaaattaaaaagacaagtcacgcataaaatattaatcatgttttatcgtctaactacaatgaaaatacgaattataaaaaaatttcatataagacggaccgtcaaagttggacacggaaactcatgccttttttttgggacggagggagtaacgtggaggcttctttttctactcctttaataggataatagatttttgtccctcaaataataagcaaatactccctccgtttatgcatatcatcagtatgcaacctcctctttctaaaaaggtatgcaaaagactgtaaggcccaaaggacggacaactaaaatagggactacctatacatttgtcgacaaatttttccccaaaaatttgacagatgtaattacagtacaattgtagtgtaatcacactgtaacttatatgtaattacactgtaacttgcatgtaactacagtgtaacttatatgtaagtttcacataattttgaatcgttagatctattacacgatttgttttggtgaggaagaaaacaaatcatagcacacacatatgtgaaaagaatttgttcccacgacctccattttaccgaaataacatgttacggagtgatttttgaaagttacatataagttacactatagttacagtgtaattacatataagttatagtgtaattacactacaattgtactgtaattacatctgtcaaatttttagagaaaaatttgtcgacaaatatatagcaaaatggactaaaataacattcagtaatcagaatcaatatttaccgtttccctataatttttgcttcgagatttttgatctactgaaaaaatatttgtaaggaaataatgcgaagcctaacatccagttcattttttttatttttgaactaggagagcagagcgccccccacccccacccccaaaaaaaaacaccaatttaatctatctatctatctatctatctatctatcttctatctattattatatactaaaagtccattaaacttgctacaaacactccaagactgccatgtggcatcctataaacactctcgagtcgccacgtgtcactctaataaattttagaatccggtggacccattatttctaaccattagatctattataaaaaatacaattaaatttatcaaaaaactcgcattgcacttgcacgaataggtatttccaaaaaaaacaaaaagtacgtccatactttgatatgtacgtacgacactgggcccacatcatctttttttcattctcacttattagatagaaaatcaaactgcctatgtttaatatgcaaaatatatgttatatagagtttctaattaggtgcatttcattgaaacatccataaaaatataaataaaataaaaacaactctaattgtgactaacaattctaaaaattttccgttccctaggtaaaagataataatatgtcaaaatgatattactaaattatatcatgaacgtattttcaggtattatgtgttttctctattcgtataatatttgaaaattaaagatcttatatattgttttgacaccgtgtcgacgtgtagcttctatctcctacttaggctttgatctagctcaatagctgagcttatcttggacacacgaaacgacacaagtcattagtgcaagattaattaaatattataaagccaaaaatagatttatcttttattatctagaatatatttctaataatactcacgttgcacttaaatatataaaatgcaggtcatgattaccaatttaattataagaaatataatggtttagacggacttagatattattatcaaaaggtattatttattttataaaaactcctagatcaatcgaggaaacgtgctcacaacaaataaaagagtagccaatccgataagtactttacaacttattgcttacatactaaaacccttaatatgtagtatataatatactttatcaatacaaaatagtctaatatatcaatcgtatattcccactaatcataagtatataagttctgtattagtgggaatattgcttaagaggcattcgtgcacacagtgcacctaataattagctgatattcttattaataagaatgtgtgtcatcaagaactgaatataggattatactaagtgggcaacttcaacaaatggtacgtaagaagagtatgccactaaaccacaacaaacaatagttgacggtgagtaggttgccagtgagagtaataacatttctacactccaaaagcactcttaagatgccacgtgacaactctaataaattagaaaaaaaatagaaacattataagaaaacaaaatatttggccattggtatacacgtagatccattattttcaaccattaaattagatctattccaactaaaaaccatttaatcgctttgtatgtacatatatacacaagatatgtcaaaaagaataaaaaagaagagttcatatacaatctgctccatctgatagttttttgtttctttctttgaggcactaaagtaaagtttatgtaatgacactcatggcgatcttctcgaagaagtcgtgccactgtggcgccgcttcatgccatcccaccaaactttttgaaagtattttttactaaccatgtaaaaggcaatcgtaaacgctcgtataaatatgtgcacaccatcctatgaatgcatatactactattcacatggaaacatattatatccttatgtaattatgctattctcatataaaaagtgttaacaaaattagcacaaataattttgacaatgtggattattccttcgtattattacccatgaacatgcgtaggcgacttagatgtatagtaaaagaaaaaaacaaaacctatatttgaatataatagacattatcatttagtatatcaaaagtttatggtttatttcatggtataaatatttctttcttttacgattataatgtaatctatggttcacaattatttatattctttttttataaacaacaaataaattacccgcgcatctgcgcgggtttccttactggttaagagaaatgagagctataaaagtcttttacatgctatttaaaacagtaaaacgccttgcttttggcaaggactttttgtcccactgacatgtggaaattcagaactgactacagaatctacggactaagtgttgtagctacaacctctagttcatatgactcaaaatatgacaacccgcgatcacagtttgtaacccctggaaagaacttcattttagcggacacaacctaccaaaatttgatgatgcaatcttttcttcctcctgccctttgtggacttgacagtgccagcagctgaagaactggtagcaggctcctgcttcctagtccttccaaggtgcttaggaaccagctcggcgacatggagcatcaacattttctctgtaatgaggattgtagaaggtgagatcagtatctctgaaaaagaaccatatttcgagggggaaaaaaccaacaaggagcacacaacagtcctgtggatgaactgtttgatgttcatgatgggcaatatgaataaggtttttgcataatcaagtgtaagagatgcactgatgcaggctaagcaaagttaaaacagaagcaagagtcaacgtctttacagtcactcctgcaacagggtagcataaaaattgcaaaacaaatactgacgcttccaaatgatgaatactacgaaggtttcagaaaaagaaaaaacatcatgtcaccttcattcatcctagctactttgcaacgcaagccatgttaatgatctacatcaattgtaatcaacatgattccaccttaacaaagaatttattgtgtgtagcgcataaagtggacttaaggttttgcacaatcctcctaaaattgacaaaactctaagtagagtaaagaggctggtaaaaaacccacatatttttaaaatccagagataatttacaagagaaatacagggcatgcgactctggccagaagaattaaatgaaagcaaagcagggggttaagaaatgcagagctatagaagagcaaatttggggaagtaccatctaccaaaaatttagtgtaaaatttggtaccttctagtacgtaggtatcaagagctaccaaatttacagtagaaaaagtagtacctcatggtacctactcacggaccgtaaaattgcttgccattgaaagttatagaggcgcatcggaggcagcagaggtggtcaccacaggctgaagttttaaggacgagatgattcaatgtcatcagggcagtaccataggcccagtttagatggtaaaaatttttgttttgtggtgtcacatcgaatatacggacacacatttgaagtattaaatgttgtctaataacaaaataaattacagattccgtcaggaaactacgagacgaatttattaagcctaattaatccgtcattagcaaatatttactgtagcaccatattgttaaatcatggcgcaattaagcttaaaagattcgtctcgcaatttacacgcaaactgtgtaattggtattttcttatccatatttaatactctatacatgtgttcaaacattcgatgtgatgggtgaaaagattttgttttgggagctaaacatggccatagtcacaaaaattcccaggtcaatggatcaaggaacacggaactctacttttcaaaggtttcccatgacaatgaacatgcgttgttccacatttttggtaactatagtcagcacataaaagataaggtgctcataatatctgattgtgatattatatacgactatagacaacagcacgtaacatgaggaaaacctacattgtacaaaattaaatgcaagtgtagaatagcatggtggacctaatgtgtctgagcctagtctggactattagtgcccatagcagtcagggaatatacaaaatcatattgatgtactttctccgtttcacgatgtaaatcattctaatattttccacatttaatactaaaatgacatcaatataaatatgggaaatactaaaatgacttatattgtgaaactgagggagtagcagataatctgatgtacatacaacaaaaaagttgaattatcatttgtattttttatgcacaattatcatgattaatgcatactaacaagtaacaaccagctctcacgacattttatcgtaataatgtacttacaagaacagatcataccacatttctttaatgtaacaaaaggggaaaaaaaggagaagaacaaaagagatgactgatgttcacttgttgtaatctcggggttgacaggtggaccatcattcttcttgagctgcaccctcactctccccacctggaacggatcccgcgggtacgccttatccgactactcgaaagtgttcattccgtagttacatgtaatcgcaaattaagggcatgtttagattgtagctaaaataaacctttaacaagttttcgcaatggacgtaactacacggctagtggtagctggtttgtctaaaccagctaccactctatctataagaggcaccatccacctatatttcaaatacaattttctcttaaactactcatccgatctacgatccgattacaccgttgtgttcgtaacaattaaatctttacaacaagatctcacatgattatattttgatgaaaaatcacaaattacttttatgatatgtctaaattacttttagatttcactaagttacttcttagatatataaaagtaaattcagtaaaacctaaaagtaatttacatatattatagaagtaacttagaacaaaatgaaggtaactttagcatgtcataaatctattgtagagataaaaacattatcagcacaaattaaattaatcagcacaaattatggaattaactaataataataaaaaaagtaatcacctcagagcattataatgtataggaagtattttaatcaaatctaaaaataacttttagatatacatgataattttttcaatgaaaaaaggcattaattaaagttactttcgttttcgttttgttataagttacttctataatatatgtaaattacttttaggctttactgaatttacttttatatgtctaagaagtaacttagtaaaacctaaaagtaatttagacatatcataaaagtaatttgtgatttttcatcaaaatataatcatgtgagatcttgttgtaaagatttaattattatgaacacaacggtgtaatcggattataaatcggatgagtaatttaagagaaaattttatttgaagcatagatgataggaatatttcccctacttgttcaatggattaatagcaaccaaaactcctaaagtactagcacgtggggtatctctggttaaaactaattggagaggcctctccaattagattttacctttcgcaatgctaaaattttggcaagataacaatattgtaaaaataattttggtaggatttcatatgtattgaccaaatttaacaacaaactaaacgtagatatttttttagtaactttactaaaaattagtatggttgaaaatgacattaaagtgaacaggcctcgagtaaagaaacacagattgaaggattttgccctcaaaaaaaaagaaaaacaaagtttggccttgattgatctgggccaaacctgggtcctttccccgagggatatgagccagagtgaacagcccatatccgcgcaaaggccaggatttggcccatatgctgaagttgtgaacaataagttggtttcccattttcagaatttaaaatgcaggtaaaatttgaagtatgtaatacacaattcgaaatcttaatatatttgtgcaaacagatactcctataaaattgtacttatggtagtagtacgtttacaactgtataataagagtgttttgagagaaaggggagagagaattaataagatgcataaaacaaaattagctattactagcatatatttaattgaatattaattatttttaatttaatagatagattaatataatttttaaatcaacttttctatagaagttttttttctaaaaacctaacgtggttttttttcggaaagcatatgcgcgcgaaagaggggttcttctttttgtattttctgctgccgaacgctgcctaaaacttgctcggtacgaaagcggaggagattaggatcaatttcgtcgttagtcaacgacgcgtttaccagcttatccagttatcccccagtagagtggccaccacgtttccgttccgcgtccgcccaagcaaaacaaaaagacctcctcaccccgccaagactaaatcccaaccgtccactctctccgacctccctagatcaacggctcagatcccaccccgcccccgccacccggcctcttcttctctataaacgaaaccaaaaccaccacagctttccccacccacgaacaaaagcagcgagagagaggcagagagcgaatcgaatcgatctcttgtgtttgttgatcgatcgaggtcgaggatgccgaagaacaaggggaagggagggaagaaccggaagcgggggaagaacgaggcggacgacgagaagcgggagctggtgttcaaggaggacgggcaggagtacgcgcaggtggcgcggatgctgggcaacgggcggtgcgaggcgcagtgcatcgacgggacgaagcggctgtgccacatccgcgggaagatgcacaagaaggtgtggatcgcggcgggggacatcgtcctcgtcggcctccgcgactaccaggacgacaaggccgacgtcatcctcaagtacatgaacgacgaggcccgcctcctcaaggcctacggcgagatccccgaccacgtccgcctcaacgagggcgtcgtcgacgaggacgacgccgccgcccacgacgactacatccagttcgaggacgaggacatcgacaagatctgatctcatctacccactgctgctgctgcttcatcagtccaatggtacaaagaaacaatccaagaattgcttcttgttacttgctactattgtgatgtgtggtgtgatattataatcacggtggtgtgatgtgtgaggtcgtctgcctgagagagacctgtatatatggaagagattcggggggcaattattctgcccaataatcaaatattgaatcgaattgctcgctttacgcgatggggttcatctagttttgttctactctggttcatgtctgatcagtctctgttgttacacagttttcattacttagggctgtagcctgtatgcactggaactaatatattaacagtatttagtattctgactgattcattgctacctgattagtgttattcagttcaacgggaacgcatatatatgttttagattttctttctttgttcgctgtgcaatcttgtgctttctccttaggctgttccacgcttttgaaacattaaagtagcccattttcaattgctctgatctagctgtttgctctctctgtttgtatgctgaacatgctcgatagttttgatcctcaacggagaaatcgatgtttcaaactgatctgtaaacaacaaatctttactacgtaatttttttggcctgaatcctagatgtcgctgcgttatgttcgtcgacctactggtatacataccgcatgattgtatttgtcatatgcagattaattactcgtgtgggttcttcttttctgtttgtaattaattgtagtcaagatatcttcggaaccttattcgatattaatgatccacaattggaatcaccaacaaggctgttgtttatcacctgcctgtgattagttgattagggtgagtattagggtgagtgtatgggaagggcactttcttttagtactatctaggagtttttaccgtgctaacaaaagcaggagtattcgttccatagtatactttgtttacctgtgcatttctcacagaacagtttttcacccgctagaggtgcaataaaaacagtactagttgaatcgatgcaaagtatgacacaatcatggaatattaaaaaataaatgttttccatgcaatattgcggcatatatttgattggctcaggatgataagaatattatgattgcattgggcatctcttcatctggtggaaagtttttcttatgcttattctgaaccattggttatttccttgcttttttcgaataatgaatagaaacccatcctctgtatcaataagtggatatatacaactaggttattttcttgtttgtagaaccatgttttgatatctcggtttaattttattattaagtagtaataggatgggctaaaagggtgattgccgataagacaatggatatgatggttactcacgcaaagcgtacagacgcgttgcgcacatgggaggaggggagagaaggaggacgactacacttttacattagtaaaataaattatttaatgctctgtcgtgtggaagcaagggtagagatgcagtatttaatgctttggtgagatattcaagaaaaggactagtgctcgaagagaccccttcctcccgtgtcgctctcgcacgggtggctcggggggcaaaaccctagccgcccgcgccgctgcaaccccgccctctccttcacctcgccgccgccgaagctcgccagcggcgaggccaatcaagcttggagacccacctcggtgcgaggaggatggggccaagccgatgacgtcgacctcagcgtcggaggcggagatggcggggcggcgtgggaaggtggcggatccagtgcctctgaggttggatctagcgcccagatctggccaatgcggcaacaacaacccaggcatggcggcagcgcgacggcacgatggcgacggcgtggcggcctggggatggtgtggtggaggcgcagccaaggactccccggcagtggagcggcctccccggtggaggtgtggctgaggagggctcggcggcaaggctgttgcggtggcgtggcgacccgaggcggcggctgctgtggtggtggcgccggcgctgacgccactggcgatgtggtggcagtgcaaaggtgcaagggagtggtggcagtgcaaaaggagctggcggcggtgggttgttttcctcattgctgatgggcaccctcacccttcctggagctcctccccttctttgcggggagtttctaagttagattgaggcggcagccggttaacggggatagctcaggccatcggcacgacgtcgtccagtcgcgggttctcctttggccaaaattggtgagggggctggcaggtggcgggacagaagaggcctgggccagcttccaggggtggcggcagggtgtagcagcatgtgtgaaagtcggtcggcggaggggtgccagtgcggtggggtggagacctcgtgctgccattgccggtgcggtggtttctgagctaatgggcaacaagcttcaaagcaaggttgtaggggctccaggcgaaagcctcgcatggtggttcatcgggccggcaacggcaacgcctttggcgtcgcaaccccccttggggcgctgttgaggattcctctcctccttggggagtttctctgggtgaaaaccacatcttttagatgggcgatggcgatggcagcatccttgatgtcgtgacctcctttggggcatcgttttcagagtctcgtcttttgtagtgttgtcataggcccggtgacgatcggccacgcatagcgggggtcgttttggttctaggttcctctctcaatggtttgttcttgcgtggttagcacgtggttcttggttgtgcactttggtgcacttccgccctcaacagcttctgtcgactttttcttataactttattccttcttaatttactcggatggcccccttcggccttccccggcgaaataaaaaagtatttcatgctttgccaaaatcagctgtgactgtttcttttctagctaattaaatattatggtctatttttccccccaattcttgaagaaaatctgctctaacaaaaaacctgccgttgcttgcaaccaaattaccaattaatcatgtttgagtataaagtgaagggcttgcttaatgccctaccactttcttgctgaattgcttcgaaactccttttctgttttattctctgaaattattggccttctaatacttgccaattgttctgctttagattagggtccaaaagcctatcaacatgttgtacgattgcaattatttgtcgagctgattgcagaagcaaatttctttgttctgattatatttttccgtgttggagatgactcgggagtggatgattcttcttgcaatttgaagataatgggagccacacatgcatcttttttgttcttttttctgtcattgctacctttaaaacattctcatgtttgctgacatgtgttggatgttttttgtccggtgagctgtgcagagtggcatctctgcatcaaatgcctttgttggcgcctaatcctaccggtatataggaaactatttttatctccttaaaggatgtttgctcgttttcttaaaaatcattcaaacggttacaaaaaattctaaaaaaaataagaacactcatacaacatatctatacaactttataaaatcttaggtcaaaactcaactcacgcgccgagaaataaaaaagataaatttagcgtatgaatagtagtgtattgttctcgtatgaaatcttcttttttttctcgatgtgtaggtcgaatttaaacctgattttttgaggatcgatagatatcattatatactctacattgttaattttcttcagaatatttcataactatttatatcgaattggaaagaaaaaagtacacaagagaacatcctctctcgaatgattagaatccactccctgtatagatagatctgccagcaataacagggattgtagttgaccaccaccaatcttgtttatagtgatagtaacggttaatacactcgtgtcttttcgcctacaattaactaattgtaagtcgtaacatttattatttgcatctacaaaataatttgcgggtgaaacttaaagccaatgttgtgacaagctcacagctttgaaaccactctatgagaggaggggtggcctaatctttcagcgagttgacaagacggcttgagagacgttgacgacccgactataaccatacaagatatttttgttgtattgcgccctaattgatacatctcaccataggttgttgatcttgtcgatacaaatcaaccttaatcctacaagcaaatcagagaaacaagtaacaataagataaaacaatttgatattgcaaataaaatcatatatacatgataagttgtggttccctaataaaaaacggcaaactaactaatcacagtttatctgaaaaagtaacaacggctaaaccttaatctaaataaaacctaagaaatattttttttgactggaaataaaacctaagaaatactgcaggggaatctagctatttacgaaggtggaaagatgctatttaagcatgcatttggttttgggatgagttgggttaggtcgaacccatttttttaaggtgtttgtttggggttaggtgggatatatgaaggttcctaacacaaaatattttcgtaagttccgaattgcccttgtccctaaaaaaacaagcggaccaaaacaacacccaattttctctctcgctaacatgtgggacatcttcaaaaagtgggaccattctacctctcataccaaacggatagatggaccaacccatctaaaatcagggataagtccaacacatcccactttctctccaaagaaacacataataaggaggtaggagggggatctagtgttgtctagggtcatgctccacctagttggggctcactccacatgggccccgcttaggctaaggtctcatatgaagttataagcctaaaaagccacgacaggtagcgcataatcttctttcttcagttgcaaccaactgtgatggaatttggagaggttaaagttatgcttcacacaaattcttgttatgttcatgaggcaaagttgctacttggtgtgtatgactatagtttcaagcacgtagccatgttcgaaaaaaagtataaggtgtcaagtaaccaagcatcatcacaacataaatcattaattgaagagcttacgcaacttcgttttacaaatatacggcaaaaaggtgaactcgtttattggtaaatttaactttaatattgatgagaactttgtactatctaaatggtgtacatttattatttttttttagttttaaacattaggacatggtcaatgctacaactacgaattactacgtcaaggatgggatgggtcgctcaaactgaaatggattacacttatgagctgattggttaggcgtagatgcttcaaatcccaagagatgtgtgacccaggcagtcaagtttccccacgcatactatacatggttgcaaaaataatgaagtctactttcacctccaacaattggctcgtcatttcgagttcccatgatggagtactgactatttgttaacagtaagattttgcaactttccttagtcaagagtcaatgatggaatttgtcaagcttatccgggtttttgtaatttactttcatgataaggatggttttttgggacatttaacttcttgccacttttaagatgtgccaattaattatttgctactcgatgtctatgacatgtgggccctcatgtgtctatgatatgcggatccagaggaaaataatttagcaccactcgtaagagtggcaaatagttaattattccaggtttttggtttctatttctgtagatagagttctgagataatgaagtcatgttagaattggactcagttagtttcttttcctacacaccagccgatcagagtcatgtctgagtcggagttgtatcagtagtttccttgtttaggataaagtcattagttatagtgcaccatcttctttcttcagttaaaacttaagatgaaacaactttatcaggcaagatcagctgaaactccgttactatccttattcttaatcaattctaggttagtttttagagttctagacaggactagggttgatgcaactcaaattatgtaaagaatcctaaagtctaaacaatcaagtaattgatcaattttcaggatggtagatatcttagctaatctaatctggcaagataatttagccgatgctagcataagccctaaagcaaattgcagccgatataattaagatatatgataatgataacttgcaataaagagattaatacatctaaagcaacataatagccacgataatgcaaaccatcgagacaagttacctcgtgttagaagatcgaagccgataccctaactcgacgcaagaactcgtcgaaaaaaactaaaagaaaaggtggcgaagcaccaaaagtattgtattgattcctcctgtttttacatgatcctaggtgtatatttatacccaaagtacaaactatgtccattatggacacgactcaaactttcctaagttacaaaaagatacaaacaagtccatatgtcggactcttgccaaatctctaagaaaccgacatggaatacctaattaatatatacaattgcctaaaacagactctttctttgaacggcaatactttgtaatccaatctaggcatgttgcaagcccaactgtgtccgtatcggctcgggttatgcctcatcggctcaatcccggttcgcctatgtttccagttgatacagcctctagccaatgcgcaatctattttggtaagatccaattttcatcaaattcgcctcgttgtttatctccaaatccgagtatatcttgccaaattttgttgttaacacctatcggctgatcggctaccttttactaatttatgctattgttttatcttattggttgcaggattaaaccaattgacacgcccttgaacccaattatttgaacctgcactgaagttaagcataacttccagggcactgtgttttgcatcaatgggaggccatgagctcctccaagtccaaatcagctatcaccaacacctccaccacgctcgtcgctgcctccaagcgtgaaagagaagcaagacggaagctccaaggttgggcaacctccaagccgtctcgctgcctgctccagaaatgaccatgatcccactgagctcgggaggctatgcgatggtggagaggtggtgtggtctagtggcgtcgatgccatcacccgcccagcgccatgccgccggcttcgttgccaagatcaacgacaacagccacagcctgccgcatctagggaggagaggggagaaggggaaggaggccgccaccctatctctctccctattggccgccaccctcagtcggcactgtcgagctagtccttcctcggtgagcttgttccttcacggcaagatcgtcttcacgtgctgcccctcgtggaaggagaggagtggccccccgcaacgaagccgaggccatcactttgcccgcgtcccggcagctctttccagtttgtcgctctctcccgctagctgctgttgctcgcctagctcctctccctctgctcgcctcctactgcctgcatttggagaggaagatcgaggtgagaaggcgggagaaggcacgctggtccaaaggagatagtgaggggaggggtgacacatgggccccaccattatttaattattttttatgtaactgacacgtgctccccacttttttttatcaaattgctacataaactttacgtcaatgccgcgtgggacgaagacatagtaaaagaagccacgtcagccaaaaccgaaagggttaattcgatccatgccattgcaaatatggcaattcagaaaaattccattacaattcgtctattcgtaagcgtgtcactcaaaattttacaaaattagaaccatgccatcgccgtcacatttttcatctcttccccatctgcacgtgaggcccacacgtcagattcatcttcctccaacctcccctcttctctttttttccttctttcttcctaggtagagcagagggaagatagtagtggggcgccggtgctccggtggctgggagggggtgacgcaagcagccgaatgtgttcccgagcttggctcactcgagaaaggtgtcggccggtacagggagctagggagatggccggaatggcgggtggaaggacttggctccggcggcatagaaggtgatggtggtggcgggatggggtggctaaaagagaggggaaactaggggaatgggttctcctcggcgaggcaaatccggtggtgcaaggatttggtgtgaggggagccgttgagggagatcgaccgatggcaaggtggtggccggacttgaggagcgcccgcggaagtagcttgtggtagccgtcggaggtgttggggccttgggggacagcagcgtgtaggggagcctcgtcgggtccgtgcgattcctgtggcgcgggtcccggtaacccggttcatctccgcgatgcgcgcctcgatcccgacgagacggtcgccgaaccgccggaacgcctccgtcgctgtgtccaacgtccactccggcgtgtcgcgctggccgaggtacacctcgtcgtcggagtgcttggacagtatctcgatcagcgagatgccgaggagcgtgcgcagctggccggtgatggtgcggatgaacgccgcgtccgggcgccgctccagctccgtgtactcctccgtgccgcgctccggcatctgccgatggtgagccatcggccggttcggcgagaagccgccgtaggggtactggccggagttgacggccacgtgcagcgccgaagcgatccagacgatggtgatgcacgacttgaccagcgccgccactgtgccaccatccatcaacttgcccaatcatccatcaacttacgacgcgatccagacgatggtgccaccgtgacggtggtcatctccggccaccatgcccggcccttggtgtggaccactcgtcctccccagccatcctcttcaccatgcacggacatgcggccggcacgggatggctttgcgcaggcattgcggaagatgcagagtgagatgcagagaggaagacgggagaaaggaagaagaagacggaaagggaagttgatggatggaaaaagtgatggcagtgacacagttttaattttataaaattctagtggcatcgctacgaatagatgaattgtaatgatatttttttaataggcaaatttgcaatggcatggatctagttaatccaaaccgaaaacaatactgttgccgtgtttagttccaaaatatttcttcaaactttcaacttttccatcatatcaaaactttcctacacatataaacttttaacttttccgtcacatcgttccaatttcaaccaaactttcaatttcggcgtgaactaaatacagcccttgagtttacaatggttctataagttgggtgaggcgatgtatccaattcacggttcaaggatgatttagaaactcgaccacaagagggacctcgagtgaactttttcctaggctaaattctgggccaacattggtataattcagctggcttacggccaatgtgggcccaccatcattattaaatgggcttaaaacttaaggtcggtggactgaaatcagacaagtgcaaataccccgaaatgggctaaaattctcgcaaacctaatctgatctgcctcctctccccacctcgacccgctccacctagggtttcagccatccccggcgtgccccatctccggcggctgcttccccgccgcgagcccgttctcggcagcggcttcccgttgcgcgcgcgtcccatcctcgccggcgcttaggcggcatcccgactcgcccccttgaaggaggagcccttagaacttgggcacctcgatggccgacggcggcggcggcggggaggccgggtccggtggctcggcgccggtctgcagcttcgtgaggaagccgccgaagaacatccggaagcgcccgaccgcgcccgcgggctccgacgacgacgacgaagacgggtccggcgccatcgccgccgcgcgcgccaagaaggcgccgtcgtccaccagcaagctcttcttctcctccgcggacggctcgtcggagccccgccggttccagtacgagtcgtcgcggacgatccaggcctccaccgacagccgcgccaccgccacgctcgagacggagacggagttcgaccgcgacgcgcgcgccatccgcgagcggcagctcaagcaggccgaggagtccctgaagaagaacccctccgctcctgcctccagctccggctctggctccggggaggtgtacaaggggatccacggctacacggattacaaggccgggttccgccgggagcacacggtgtcgtcggagaaggccggcgggtcgcacgggccgctccgcgcgtcggcgcacatccggctctccgctcggttcgactaccagccggacatttgcaaggactacaaggagacagggtactgtggctatggcgattcctgcaagttcatgcatgacagaggggactacaagtctggatggcagatagagaaggagtgggaggaggcggagaaggcccgcaagcgccgcatcgctatgggtggggatggtagtgattacgaagcaggggaggaggatgacgatgatgatgaagaagcgttgccctttgcctgctacatttgcagggagccttttgttgatccagtggtcacgaaatgcaagcactatttctgcgagcactgtgcattaaaggtatgcggcagtttattctgttttcattatatgcttatatttatgtttatgtttcagtctgttctgcattcactatttatcgataatcatgaatgccaactgacgaatatctcttgtagaggatcaaatgtaaccatttacttggctgtgttgatagttcagacttcagacacataatctaggaatgcttgcagaaacaagtgttagtctagagtctagactctagagtaaattagacaaaacggttagtttaatgaacgtagctcgagataaatctaggttttcttggctagcggtgcttataccataagattttggccatatggtttcacaagagcattgtgcattgtcagtgtcatgatggaggttagtgctgaaggttttggtgctttggtcccacaaagcagtggctcgaccagaataccagatagctcgacaacatctcatgcaggtggtggggactaatggagagagatgagaggtttggttatggtagttttctgaacctaactataaaaacctatgtataagtgttactgcaaacaaacaaaaatttatagttagaacttagaactgtagaagagaataaatgtgagtgggataagagaaggttttaccgctagaagcaagggcatagttttttttggagcagaaggagatttttcttgtattacatttgatgatagttaccggtctttggaagctactatgaaagtgtgtggtataacataaaattcttctttgacaaaattaaacccacttatgaggcaacttctgacatggattttttttatgaagaatatcaaatatgtatataaaaatcacgataaagtttagttactaacactaagtaattgatttatatcatgaaacaacgaaataccatgcaatcttgggtgttgttactttcgtggaacaaacactgaagataaatactacttcctccgtttcacaatgtaagactttctagcattgcccacattcatttagatgttaatgaatctagatatatgtatgtgtttagattcattaacatctatatgtatatggacaatgttagaaagtcttacattgtgaaacggagggagtaatgcaataccattttgtttctcattttgtggggaatagttctgaaaacttaggtggctcttcatttcttgtccaatgtatatgtatggtgttgattataaagaaagggtcccacttagcctcgtgttggcaagtttacagtttgtgacaactgatgcctcataaaaccagtggttaagtactagagaccacattttaacttgctattggaggatatgccactatttactcttatggctctatgtaacccacccacaactcatgatgcatcgattagtatagacatgagttttttgggggcttggtacagtaggtcttttttgtacatagactgccaatttgtgatgagtaccactacacaaagtaacctaacctttcatatactgtgagttggagaatttgtcttggatgtgaatattgggttagctgtagttctgttggctatgtggtacaatttataggcttgtttagttttgtacctaggttcttattatgaggttattctagatgcattctttgaaacaatagttttgtaagaatagcttcttcaggttatatctggtcatatttcccgtttagagatggcatgtgccacttgcttggggcaagggagatgactcgagaactgagtcagcacttgtgtgttaaaacagctgccatgccgaatggaaatcatgtctgggtgttattttacctatttgttcaagtgaattcagtgtcaaaactagacaatctgaatagttgaagggggtttacatgtgtaatgtatatcattgttggattctattccttctgtgatttactgctgctaggccttgtacctgtctcatcatcttgctgtgagcaagggtcaaactacagccatgaggcaaacaattagctatttccttgaacaagtccagctgcatcaatctttccaacctctagtcaactcttcactattgccagttattgctccagaagggacccattttcaggtcttggcttatcatcttatcaataatggcaagagaaagcatcagggaatgtctagcagctcttaaagccgaaaagaagcttaacttcttccataaaaggctagcaagggaaatgtctcctattgctcttggatcttatacatgttctacacgcacaggtcatgacacagaaagaatgaacgaatgtgcaggtttctgttagtggctagtaaagaaaggcagtgatgtatattcttatgttgatgaatctttctttaaagaattcactcctcatacatggtgcattgacttaggtggcaccgtgcacgttaagaatacttcatgcagatggcattatgtgatgactgtaagaggagtgtagcaaaatcttagcgtcgctaacagagcagagactcaagtcaagacagtccttcaacttgcatttaggagtcgactttagtcttttttcttggtgatgttctattcattcccattgttgaaataaacaagttatggccatccggagaaagactgggaacaaataaaacattgtctcctaatgcaagtggtgaagcaaaaactgccttaatttcaatctctgttccattggcgaccctaagatgtcactccccttttatggccctcacataacataatccatgtaaagaatttgtaatatccacagtggctcctgagtcaaattcaccatgaattaggggttaatttagtaaagagattcatcaacatatgaatttatttcattacccttcttagctagcttctgtttggaacctgcataacccttctgtatgtgtccttcctgctcgtagaacttgcacaacaaagttctaggagcagcatgatttagaggcattaaaattacttgtctctggcttaaggttgaaatgagggcttcttcttagctttagagctgctagactccttgatgctttctcttgccattgctgacaagatgagctttttccttctgtatctcaactttttgtgtatcttcttcgactgaactagtgaatgactaatgagctgctatggaccatttttctttctgaatgttgtgatcttatataaatgacatggactaagagataaaaaatggccatccatatcctttttaattaagtacttcctttttttaagccttgaaatgccaatggatccttctagtttattttatttgatgtgagttgtatgcagagtggaataacgctgaaaatttagatctttgtactgcttaacttggattagaacgtgacagtgaaaattgaatcaaccatgttaaaatacttttttttctagaacctgactttttcaattctttggtgcacattgctgtttatttagtattggattcatgaatttgattatgttgatcatttcttagtgtgtcagattgattattgtgttatgtgcaagttccgttgtgtcatttgagatgttgaaatacggttcagttgctcatgtttcatgcctcttatggcaaagaagattctgatgatttgtgtatgttttttgtgttattgttttcagcatcactcgaagaataagaagtgctttgtctgcaacaaaccaacactcggcatcttcaacgcggcacaggagatccgcaagaagatggcacaagacaagaagcaatagtgcccactgacagttgaagaatgtgacttgtacgttagagagttgaagaatctaaatgatgtggaattttagatgacaaagaaaactaccaattagttttgcattctgtttatgtaacaatatctgctagcctactctcacttgctcggttcagctcagccttttgtatggcaaatgtattgcttctgtgaggatgtgaattgtgcagagcccaaatagatgaggcaaacataaaaggttcttgatttccttatcagattgtttgttgcacggtgccttttgtcggcgtcttgcggtaattttgctgaggaaatttgttcttttcaaaagtatttgtgctataagaaagggttacagctacgctgtaagtttagtgaccaagaggacaaggaattaaatcatggaaagccgtcaacaaggacgtaatcatgtccaatttttgagattttactttgaaaattttgaagaactaaaggtgatgtatggatacttgcacttactgacagacagactggagttcattctgaattttgttattggctgaaatgaaatgctgcatgactaatatgaccccacaaattccacaaattaagtcaaagctgctcagctcaaatcaaccttcacgttttacattcttttatacagagttttctatccagtacattaatttagtttgtgcgctgtatatttatcacaggcacgctacacgcgcaatccaatcaagacagtctgaactcgctttttggtgaataattctaagattcgtactatattcttcctaaaaccgatatgttatgttgtgagtgcatctagatttttcataacttctatctatctaaatcaaacggctgaaatgattgttagtaaaagttcagtaagaaaaaattagtacgtgtagcagtgtttgtgtaacctagctcgtctactccaaaggtgcttatcttttagcaatgtttagcatgaaggaccatgattcacatctgttcagatcctaaatggcgacctgatggtaaaccttcgactttctactcctatatccctttcagaatgaacttttaagtgctaaaaaacgtgttgctgcttgcatgcttacaatcccagttttctggtagtagtgatgagtatagttttttttttctccagaagagatgatagtacttcctttcctgctactgaggtgagttcagttcttggggatagtatgtccacaactccagattggtcattcaaaatttctgaggttttcaaccttgagcagcaagctggagactgcagaaatacagctgttgtcaaacacgtactcctactacaatcaataaattttcttttctgtaagatatatttaagatcatcttgacataatgtgcaaggcattgactaccggacctgcttgggccttggagtgattcacaagaatggaagagtctcaacaggcccagtgaagagctagcccaagtttgcaaaatgggcctactagacctatcaagaaccaacttgggttctacatcgtgattaaccaagttaatctatgcatttgcagcatctgctaattaatctagcagacggcacacgtgtgcgtcacgctgtcacgcatgaccagaccacgtgacgcaatgaaatgttatgcaactgtggagctagcacgtgtgtaaattaaaaaattacagaaacgtgctgaaccacatatcattaggaaagcacatgatcgtaattaatcaaccagccaggacagtgttaatgcatatgcatgcgttttagttcattctagtattctacagaccatcttttgcatatttgcatttgcatcgtctaccagcagaacacacaaataaagagccaatgcaaagagctccttcccttttccaaaaagagaaaaaaaaacaagaggtccttcagtaccctggatttttcagaattaaaaaaatatttataaattattaaaagaccgtcattttctcatagctgcataaatttggtcgagcaaaaaaaataattggccagcaaaaggtagttttaaaatgagtaaagtgcattggcggtacttaaacttgtagggttgtgtcatataggtctctaaactctcaaaatacatatccagatcctaaaacttatcaaagtgtatcatctatgtcccaaatcaacacatcccctctaggattctacgtaacgctgatatggcataccacatggacatgacgtgatgtgtcctttttttccatcttttctttttctttttcttctcattcttcttttttttttccttttttctactcgggtcacagagaaaggagaagaaagggaaaaaagagaagaaaaaaaggaaaaaagaaaaattttaaatgggtcaaaatgatgccacgtcatgtccgtgtggcatgtcacatcaacgccacataagatcctaaaggggttgtggtgatttgggacctaaatgatacactatgacaagttctaagagttggatatgcattttgagagtttaggaacttaaatgacacacccctagaagtttaagtactgcctgtacactttactcttttaaaatctagacagagaccattttttgtgctatgaatattatactttaatatgctattaagtccactattttagtttcaaatgcaccaatgtgctagtgtaagtttttttaaaaaaaagaattgtttgaagtaattttatttttttaaaaaaaatcaaatgcaatttcagccatggtttatgtatttgaatttaaaaattagtaactgtactaaaacaattctgaaaaaaattctagttgcatattggactacttagaacctatgtataagtcacttttatttataaattgttttcgaccttatcttataccagtgccacatcacaaaccatatcctaattttttaaaaagtttaggggtgagtaatgcctggtattaatttattattattgttagacgtttgtgtaagtttgggattgtaggataaattaacaagctagcattatatatatactctcagctttcagtaaagaaaattaatggtggcaaggaatcgctcaaaattttccgatgaagaaatacggaagatcagcaccaacacctaattataaattatctccaagaacctggaaattctcagggcatcatcagctagctacacgtcgtatatgtgtagagtgtagtggtggtgcttgcacgatagctagcgtgatcagacgaaattaccttgtacagttctacattgacatgactcctcaaagttggaaacgaacaaacacaagctgactgctcctaacattccatcctgaatcgattctgatactttcccatatccaatacaatgcaaaaagcattgtttcttcccaatatcgcaaagaagtataaatcatgcacaaaatccttgcccacaatcaacaagtatcccctaaataatgtaccgtgaacattttgttgcatttacttttcaaaaagtaaaagcaaataagataccctaatactagcttcttttcatcgaggtagctaggggagactgttttaacattccattaatctaccatggatgatcataattgtacttcctccattctaaaatataaaaatctaatattggatgtgtcctgcgtttcctaaaccgccgggaccgaggttaccgtgccctgacggtaagcggcctaattttttttaagcggtgataaaggcgtctagcccaaaaatattcaaattttggaaataacccagagtgatattaaaaatgtaaataaatttcataaaaccccactaattatgaagtttcacaaaatcacatgaatttttttacgtaacacataaccctacgtattatgatcctaaagtttccgtgttaaccaatttgatatacttctcttttcaaaatttaaaaaggatatacttgcgaggatgtaacatttatatgatgaatgaagaacttgtaaatttgaggtgtgattgtagagctcaaagtatatatatatggtagatcaaagtccaaatgatcaatatatagtgtgtggttttatgaaactttatggctataataccttaagttgtgtcatgtgcttaaatctttatggtattgtctaacttagaccatcatacacgtggttaggtgaaatctatctattaacttaataaagtaatagaaataggagcctccacattcactctcgtagcctagaaaatcccacattaattgaaagaaaatgagggaaaaataaaaagaaaaaggtactaggattgggattgtaaacgcacaaaaaaagtggaaacagacaaggaaaatagaaaaacacatattataataactgcctagattaaacaaagagttcaactagaaacacaattttaaatatctaaaaacttggataaaaataaagaaaataaataagtccaaacaatatggaaaacctttctgataattgttcagggatcacactaggatggaagagcggatcgatcaaattgccttgcattgatgtctgtctagcaggacacctgagcaaaactaagaggaagtgtgaaagctagaatccacggaggctagcaatcaacgacaagattggagataatcacacaattagataagacaattagaaatataatttacaaataattgaaatttagaacaaaaaaaattagaagaacagtacatataaaacacaatacgagtttaattaaaattttaaataaaaataaaataaattctgaaattttaaaaaagagagtttaagtaggaatacaattttaaaataacaagaatttggaaaaaaaataataaaaaaacaattcacctaaaacacaacgatggcaaattacaacaagaaggcagcgatggagctgtaaaggagtaatgtgacgtcgattgatgggactaaaaaactataaaacaaagcaaagaataattagcttcgatttttagaatcttaatattgatcaagaggagggggtggcgggcaggctgtgaaggagttgagtcgtgatggtttacaatacttctatataaagtaaaaaaaaaccagcagtgaccatgtttgatttttttttcttaaattcgaataacaacaaagagaggacgggtggatcgtaaaggagcacagtgaaaacgtttaacgagacttctataaattataaaaacgataccagcaagacaaatgaactctaaaactacaaaatcttatttttaaatatcccaagaagaacgaatagaccgagcaagtaaataaaatagctgcaaagaagcaaggagtggcatctggtttgatttttaaaaattataaaattgaaaactgatgatgataaggtttgattttttaaaaaaatccaaagacaataagatgactatatactatttaaaattttttaaataaaatcatgtgtacaaagatcactccaattttatataggtgctagccgcgcaattgcacgggccacctagctagtagtttattataaaaatataaatatcacactgccacgtgctcgatgccggtcaagaaataacagtaatcactagttctatgctagtaacagtttcatgaatacgccacgaataatgatgattgtaatattttatagaagaagaaaaaggaccgatggcatgttgagctaccattaccacaataaaaaaaatactagttattttttttaagaaaagcattgataagggagttcactctgaaatgttcgaattttagaaataagccggtagtgatattaaaattatcattgccacgtgcctgataccagttgcgaaatggcagcgatcagatcactagttcataatgctcgatgtacaccagacatttgaaccgtgttaaagctgtagtattcaacatttgtccgtactgcacaatcaaggccaggggcacacccacccgtgcgcactcggtcccccggtgtgaaaaaaacctgtccaccgttgcacctttaacacccaaaaaatttgtgctctcattttgtgcaggaaagaacacatgcatgagacaaaagaaaaagagaaggcagtgatcgagagatggaattggaatcacaatcattctgtgccccctactgccccaaagttggctaggtgcgcggttgtcacctcagctagtaccacacacacacctgcacgctggagaacaaattcgctgcggcatgcaacgcaacgcaacactagctgcagatgacaacacggatcagtttagtgcagggttcacaaaaccgataaaatttttgcaaaaaccattcgtaaaaccgctacgtctcgatttatgaaaacatcgatcggtattagttggtttttttcgatgttgattgaaagtcgacggtttttattgtttttggtcggatttgggtaaaccggtgagaaacgatttttacttcgaaatcgaaaagttaaaccttggtgtactgtatgagtaaagtacgtcgtaggtgtgttgttgtcgatcgtcgtcctcgtcgtctaatcgtctcgatctcccggttgatcggaatacgtgttcaagacatgcagatccagtgtgtgtggttgtagtggtaggcttgatctaccgaagctaagcaaacttttccattggcctttttgaggtttcccgtgtggttggtcgccacgtctagattctggcaccggtaatgcagatgcagcagtccggcagatcaggcaggcagggcaggagcagcctctcgaatctgaatcttttgattggagggattgattttcttttcatatttctttatgtatgtttggtatttggaattttggaaaaagctggctggttccattattgtttcttggaaaggatttacatcctataaatctgcatttttttctctctctctctctctctaaagaagtccatataccccctccccactaaactttgagttgaaatctctttttattttcgtccccaaactttaaacggccacttcctatcatctgaactttacaattgtttacataaacactaaaatggtttttcaaaattgttttgtctagttttgcatatacattaggtgattttagcaacatggcgtccatattgaatatatatacatcaaaatcttcagtttaaactctctctctctctctctctctctctctctctcttatcccccttcttctcttacaacaatacccaaagaccagtataatgccgatagaatttaacttgagagccatggattaacgaaatgtaaatatgtcacttagtcaaaacttctagtgtaagcatcaagataggtgaaactagtgtccaaaacaacttcaagagggctatagccttgtttagatccaaaaaattttggtcaaaaacgtcacatcaaatatttaggcatatgcatggggcattaaatgtggggaaaaaaccaattgcacagtttgtatataaattgcgagacgaatcttttgagcctaattatgccatgatttgacaacgtgatgctacagtaaacatttgctaatgacggattaattatgcttaataaattcgtctcgcagtttacaggcggaatcggtaacttgttttgttattagtctacgtttaatacttcaaatatgtgtccgtatactttaaaaattttacacccaaagaactaaacacaccttatatgaaatttattgtcaaaacttttttcttggagggaaaggggatttaaaaatgtttgaaaaggaaacttgttcactaacactactaacatgtataaatagaaacttgtagattatgatttgtttttacagtattattgagcaattcaccttgaaaggagatgatcaaaagtctctcgcagcaatagtctaatgacacggtggatatgttgcatttgcgtgcaatttttctaacattatgaatattttcattaaattttagcatacaaactttatcgaatgcatgcttaatatggtagggaactgaaataaaacctaaagaaaactaacacaaggtcatcatggacaaacaactttcacaaaaagtggtagccttccacatagctaccatcaatcaaacgccaagacttgaccaaagatatctgagagccgatcattccaacaaacccaaaccgaagtgaccaattcatcgaaggaaccaaccaaccaacaagccctgttcctcccaagcattatttcttgactggctggctggtccaatatagccacacaacccatacaattccctttcatctcagtgtgcatcaagcattttgtcagggcaggcatttccatgtatcatctcaacttgcctttgatctctctgaagaaataccatttgtctaccacatgctatgccaaggcgacagtctccatgtccccctctttcggcagggcgtttgtgccggttttccaaatgggtgaggtttggttcatcacggcgttctgtttctttgagctgggatgattaattaagcaacccccaacttgattactcatcgccatcagtttacctggattgtgcaagattgataagcaatacagagccaatttaaactgcaggaccagacagacagtgactgaactatcaagccaatcaggatgggttcttccttgttcctctagttggttattttgctcatgttgccgagattgttatctcctaatcaaacagtgttgccatgagcactttttacaaagttgactaggacattaaccatgtactttagatgatgacaaaacgaatcgtcagcattattttggaggatcttaggccatgtctgaatcaatgactccatgctcgcggttaatctcatgtaatttattttcgttgcttttctgttattcttcttgtattttttttcaagaatcttattcctgatagtacaaaataatgcaatcttctgtctgtactcgaaaaaaagtagtggtggtaatacttatttttgttgcttcaagttggtaccaagaatcacagaccatacagatacaggcatgcaaaaaagaggagaaattactagaatgcagagcaggacaacaacagcaacgatatttttaaatcttttttttcttcattttccaggtatcataatccccaacaccatctggatggcctccaaggtacattacggcaggtacagaaaggcaagaaaaagcaaggaaaaattacagtagagtagatcgaaaagcacggcatgatgatgatattgaaaaaagaaaaggcagggctagctgtttttaacaagagcagccaggccctcctcctgtaaataagacagtaaattacccccaatgggactgacaatagtagcactgcacttgagagtacatataagaagtgcagctcaatttgttcttcttttgctctctgccatactaattaacagcagcggattaggcagggtgatggtgattagattagctaattaatttgagacatgtagtaatatccctttgggacggcttagctaaaggtagtactccactttgctagtaagtcatgaaggcctcatcggtggccatgcctcctgagtgactggctagctggtgaagtaaagagggcggcgtgagctagtagcggccgttggcggcggcggcggcggcgccggaggaggggttgttcttggcggagtcgacgacgacatcggtcatggcgacatggtcggcctccttgcgcttgcgcgcctcgatgatctgctgcgtcgacttgtagtagatggcgtacaggatcagctgcgccaccgcgaacatcactcccagcccgttggggatctgcacatattataggcaaatccaataacaacatcaggattcagattcagattcaggcattcagacagacaattaccagtactagtagacatttagctgcaagaaccaatcgttaatgacatatcaaaatcacatgatgctactactacaggagcaattaggtgaggctgcgctgcccgggcttgcatcacgcgggtgcggggtgcggcgcggcgcggagcgtagcggagtagcgtgtggcagcggtcaggggaagcctgcccgcagctgcagcattggataggaaaggatagggagaggtaagccataggcaggcagtgacacaagccgagctgctgctgctgcagtggtggcatctgtccgcttgcgcctctgcatgatgatcagatcaccaagttgcgtagtagtgtaactcatcgggaacgcctctgctgctgccgcaacgcggattgattgaccgaaagatcaatccatttggctcatctgcgtccgtgaaatccattctcacggccacggttcaacccggccctagattctgaccagccgggacccacgcacccatccacgcatggtgcagatgcatgcacgagccgggcgggcgcacgcactccacgggattggaggcctccgcacggacctcacctgcctgttaacttcccacgaccaccacgagctgggcgtgtcacggggcgccacactactagtagcagcagcgagctatgatgctggtactacgaccttaccctacccagctacctaagcagccatggcaacccaatccgaacgcaaccaactcaactcatgcatagagacccggtcgcttgtgagtgacaactagccatatatggcaccggatcacactcgcacatgtgcaggcagcaagagagaggactcccaagtttttaggcttgcggtttggttggttgccatggcatggcatgagagcagtttgggagcagggggggccatgtgccgtgtggcgacagtagtggcaacctcctaaatacttgcacacacaccctcctcgaccgaattggttctcctgcctgccttggtaaactccaatgatactctactttgctaagtagaaagtactccttatataggagtatactatcattgggtggagacgattgccaaagccttttgtactcctagtgctaagcttaagcttctagaagcaattaattaagtggtaatcagcatgggctctctactattagtggtagtattactttaggcatattaattactacgtttaacttaaggtggtaattaagtagagtaaaaagtgaggtagtaattaaatttgattaagctgggatatgcttaccgtgatgtagaggtcgaagcggatgagggcgtaggcagtccagcagatgccgttgaccagtgacgccagggacaagaaaaggggcatgtactccacgctcttagtctggatcaccattttctgaaaccaaaccacatgaatcaccatttatttttacagcacaatctaattaattaacatggtaaaaacaacatcaacaaactcccatccatccatagaattttcaacatggtacatacagagcatgcagaaaacctgaagcaacttctagtactagctgctataggcctatagctttatttatttctttttcgttcaaaggggaccagaaaattaactctctgtgtgtgggagaaaaaaagccaaatcattgggagtaaaagcgaaaggaagagcagagaaagcagcagaagatttggcacgacagagcgtgggctgctctagcagataaagaaaggaattaatggccatgctcatgcatgtgtgtgactgcctactatttgtttcttttatccaaccaaagttgatcatgttttgactcctggtcaatcgaatagtaataaacaatcaaacaaagactaaactaatccccccgttcttttcatatgattattttcattccatccagtgttaaagaatcaagcaaccaattgttgatgatcatctgctctgctactgtctactgacaccgacaaaccacctagtaccataataaaattaattaaccaagttaatccatccaattaaaattaaatactagtactaatgagtcagtcaatcttagaagaagtggaggagtaagagtaatactacgtaccatgacggagaggggggcggcgtacatgccggtgccgaagaggacgcagaggataccgacgatcatggagcgtcgctcgtgggtgtgggcgaggttgaggacgagggcggcgacggcggcgacgaaggcgacctcggcggcgaggaggaggaggacgcggcggcggacggcgccgagggagaaggcgaggaagagggcgatgtaggtgagctcgatggccatgccggtgccgttgatggtgatgaccagcatgctgtgcgggtgcaccgcggggaggccgtacagcacccacatcatgcagttgagcagcgtcgccacgtacggcaccgccgagtactgctccaccgaccccttcttccagatccgtatgaacgtcggcctgcatacgtatttcatcttcaaaatacacgtacaaatacatgtacacattcatctttcttggaatggatctatctatctatctatctatcttggcttgattctttttctctcgtcagattttaggtggattgatttaattttattcttccagtacgtgtcgccatccgtttctttctttgtgacacgtatgtacatactgctagtaactggtactagtagtagtactactccggtttcatcaatggagtgtgttcttgttgatctcgagggggaggaagaagaggggaggatgatccgtttgtgacacttacactggggagaggaagagcacgagggcggttccattgcctgcaagatgggagaaaaagcaacagagaaaaaaaaagtgcaagttagtatgatttcgcgtgaggagcaaaccaagaaaaaaaaaggagaggaacaacagatgaaaacgactcgaaattaaatcctctccccccatcacaacaacaagaattaaaatccgtgcgacaatctgtgccgcatttgatacgagacagcagggaggttggtgaggaggcacacacacgcgcaaccgaaaagaggtaacaggaagaaaaaaaaacacaaaaagagagagggagagatagagggagagagagaaggggtggccatggccgagatcgaagaagagaaaaggaagtgcagggagagagagggcgcacctacgacgccgatggccgtgcggatggtgtccggcgagaccatggcggctggtcggcggcggcctccctcgcgaaaacgaaccgcgcgcggtggcctgcgtcgctcgcttgtcgccgaagtcgggagagacgacggcgcggcggagcgagtagagacgcggggcgggctctggatgcaactgcaagtgtagtagtatatgcaaccacagtagtggagtcgagacgcgatgagcgaacgaaggatggatgctctgagggggcgagaggaggggggccttaaatagactcgactccccctgcgctgcggccctgcctgcacggagccgggagccgggcccacccacccatggccgtcccctctcgctcccgtgacggtcttggtggtcagtgctggtgactccggtctttctcttggtggtcaccttttgctctctctctctctctctcttttttcaaaaataaaataaaacaaaaacttcgcaggacaataaatacgcttagaaatgattaatattcgtgggggggaggagttggtccgaaaagatttggtttgcgtgcgtgtgcgtcgcgccgtgtcgatccgtcccaccaccgtcccggggcctgtagggctcgccctgtacgtctacgcgcgcaacgcggggtaaccgcctcccacgtactgacaacgggacacccgggcacgctcctggccgtcggatccgcaaccgacggcccagatcagccgccgtacgctcaccgaagtgttgttacgtcgtagtactactactagactaggactactactgctactggtgttatgcaagccattgtctaagcgtatgacagtcacatgcttatatctcgcataattaaattgagtaatggatgaagatcaatagatcatgcgcgaagagcttttgcgccgaatcttttgatgtatatggaattgaaatttgtaatggtggcagatgctgcacatttattgtttgcacacgaattttccagatacggtttttttcccctcctttttctgagagtaatctagataatttggatttcaatttcgaggagtggggtataaataataaatggactatgactaactagagatgcagagaacttgagatttatgtcaaatgccatctagcgtcaccattcatagcaaaaatctccacagtcggcttacatattaattaatgcatcttaatctttttatttgttacaactccttacaccctccatgaaaaagaatcaatttatatagatgaatctgatattttcaaaagttattttttctagacggagggaatatgtcctaaactgaagagtaattgttccgacttggtccaaatccttccattagagcaaggataataatagagcccacttcttactattagcctatcttaaagccaacatatataatagattagcaataaggttagctacaattttcttctcctctctctgtctctcacttacacatttaatgcatttgtcttggagcttgtgataagctaactcttgcatgagagccaacatccttaatttttcactacctctctcctctatctaagcttataagtacgtttatagctcactgttatacttgctcttaaagagattgatgtcacaagtgatgcaagctaattaatgggaaatgggtgcatgataattgctctgcttctgttctagtacacttcacaaggatcctgttgtcactttgtcaacctatgcatgtcaagacttatgccagtcacatgcttgattacattagttttataaaaaaaaacatgcttaattacattgtgatgatgccaacagagcttatatcttgcataattaaatagttaattaatgaagatcatgtatacatttgcaccacagaatctttcatatatgaaattaaaatgtgtaatagtggcagatgctgcccatttattatttacacacatagtttttagattcgatattttttccttttcgagagtcctagatgatttggatttcattttcgaggcatggagtataaataataaatgcactattactaactagagatatagagattgatgtgacgcatttggcatcgtcactagatatagagcaatatctccactagatgtagtcggcatacatattaatatcgtaatatttttatttgcccaatttattttttactaatcacatcctcagctgaagagaaagtatttgattacaatgaaaacacacaccaccatgcgcacagacccatgaatacattctcctaacacaaatctaaagatttggagaccaacggcatatcctttgccccactaaacttttattaaaaagccctcgcgttgtacatgatatttgtggatcgggatttaaactctcaaaaatagagtgatgcacaattgaatcttaccaccacacaccaccaatacctccccaaaacagaagagtaacaataaaggcatttacaaatttatcactaattttatatattttgcaacaatgccattagaatgacagcactagtggtatttttatgctttttagtggtaagtttataataatgattgaaaacggtggtaaatttataatttcacttaatagtaattgttcagatttggtcaaagccttgcattaaagagggtgatgtcacaaattgagtaagctaattaatgataaatggatgagatcagctgctctgtctctccagttcacaaggatgctgtagtcaacccaacccgtgcatgcatgtcaacccatccatgtttcacaaggatgttgtgttgctctgcttctgctagcagtgtacatatacgcgctttggttttgaatacaatgtgtaaaatgcggtgtgcaatgttgttatacaactaatgaaaagtaagtaacaacatagatgatacattcgcttcaacaattaaattatatttaacgacacgtacatattgtccaatttttctctttgaccagctcttaatatctttatttcttgcggagcttatagctacaagagtaacgtgattatataattgaatacttaatatgttcagtataacatagttcgacctttggaatgaagaaattttgttggtagggggggggggctctttcaaatattatttaaactaagttcctccaaaatttctttattccaaaggagcatttaaatttgggttgatttgctatagtgataaggatgaaattgttttaaagaaaagatatgtggaatcagaatttatggcctagtgccatagccgtaataagtgtgttagcaggctaagctacactctcatattagaggaggagacactagctatgcaaaccaagaattgactttcccatttccccctacatttatgcttttatttattttttcttgcctgtttttatttggttatgacgccaagtgtctccgtatatatatgcatgcgcaatgagtccatggcacctggcagtgattaatggcaccacgtaattaacccctgcgaaatatttttgagaagaaaacgtagcagataaacataaagaatcaggaaaaaaattaattaagttagccaaccgagaggtggatcgaatttgggcccctttttttttcccagcaaaacactttggatgaagatgctgctgccaatcaatcagtaactcaatagtacttagatatttatgcataatacgtataaaattagtttaatagcattattactactatagcaagtactcaggatgctcgtttcattttcaacttatttatcgaattattgaaacagattacttacttcccaattttttaaaaagtatgttttataaaaaaattatctaccaaattgtttagaccgctatttgttgattttatttcttacctgatttatccatacaattaaaataattcgtgacgataatccgctcaataacctaaacaaacagggtacagctttactaataaatatcttcacagcatataaaaagaaaataaatatcttcacagtacgctaacctaaacttctaccccctccgtcccgaaataagtgtagttttacaccgtttatgtctcacgtttgaccgttcgtcttatttaaaaattttttacgattaatatttttattattatcagatgataaaatataaatagtactttatttgtgactaacttattttaattttcttataaattttttaaataagacagacggttaaacattggacacgaattttcacagctacatttattttgggacggaggttagtaatacttgcactagtaatacagtagcatcatgcgcgtgatatctctacagagaatagcgtgtggatgatgatgatgatggatagatggatcaaatcaatcaggccgtgacgtgaaacacagattgatgaattggccggccgtggatggctggctggtcaaaacgcacggcacatattccaaagacgagagagctatagcacccgggatttttttatacgtgcagcgcagctgatctatacccgttaccgtgtcgaatcttgcattgcgtttggttcatcatcgatcccattgtcaaccctatctatctatctatctatctgctgtattatcgcgtacgtacacgtactaactcgatcgctatgcacttacgttgcatgtaggagtatgtacagttgtatacgccgtactagcatggtcattaataatgtgtgttctcctccttggaccggtcgattgtactcggaagatcttacgacatactacccccatctcaaaataagtctatttttcacccatcacacatatatactaatacaaaaactaaaactagaatactcttattttatcatatctcaatacaactatttatcactttatctatttctaatataattattattctctattttcacaaactctgatgtatcaattacttttaaaaaatactatcttattttggaacaaatggaaaaaaaattaaaaatgaacttaatgtgggatgaaggaaggctgtgtttagttcacactaaaattggaagtttggttgaaattggaacgatgtgataaaaaagttagaagtttgtatgtgtagaaaagttttgatgtgatggaaaagttggaagtttgaagaattattttggaactaaacttctaaactttagaattatccgggctgtgtttagatccaaagtactttggatccaaacttcagtccaacacatcaacctatcatatacacacaacttttcagtcacatcatctccaattttaatcaaaatcgaaactttacgctgaactaaacacaaccacggtattgtacatcaaatgatggaagacatataagtactacacagtaagcagccatggccagaagtcattgaccagatcttgcatttacacttgcactacacttttgactccccagataggatggcttgcaaatgagaaacgtagctagctacgacgagggcatggcacaaaagggaattacgtgtacaacaatacagtactgtactgaaggccgccacaaccaacatgcaaaagaaaattttaggctcctagcctagctagcagctaaagtagttgatgaagaattcgtagctgcacccgagcaatagttgaacaacaaatgatatttttatgggagttacttttcaatcgcttagaaaaaatacataaaattttactcataatttattattatttctaataaatcgtacttcatccttttcacaatgtaagtcatattatttatatatatatatttctgtctagattcattgacatcaatataaatatgagaaatggtagaatgacttatatttgttaaacggagggagtttatcatatgactaaccgagtaggcttgagagtcgtactactagctgctatactaatcaaaccaaggagaaaaaaaatcgtaaattgatggatgaatatgatgcagcggtttaatggctaaccaattagtgatggtatcaaggttaactagaccacgatactggacatacctatatgttgctatatattgggacggatagaatattatttagtgcacacgcattttcagcttatgttcttttttttttctaaaacttccatctgaaaatttttcatcggaaaatacattcatctaataatttccatataaacactttcataagaaaaatagagtaaatttcacgaaactacatgttttatggttcaagttgcagaaaaccacaaacattttgacacttggcatttaagtacatatattttggtagtttagtttcataaaatcacactatcgatgaatagattcacccgtgagatgacgtggtcgttccatctaggatgaagacgtggcatcctattaatttcgtgcgatggctgttaataggatgacatgtcctcgtcctagatgaaacagtcacgtcatctcacggatgaatccattcattgatagtgtggttttatgaaactacactaccaaaatatatgtacttaagtgccaagtgtcaaagtgtgtgtggttttctgcaacttgaactacaaaacgtgtagttttatgaaatttactctaagaaatagtatatgcaccaaataaaaccctacaaattagccgagccactctatgaccctctctagtctctactctttacttgtccgtgtggtggcgtagacaactaccacgtcgccttacttgacacccaattaaggctttgtttagatctcctggtaaaatttttattatctcacattgaatgtttgggcacatgcatagaatattaaatataaacgaaaaaaataactaattgcacagattgcttgtaaattacgagacaaatcttttaagcctaattgctccatgatctgacaatgtggtgttacagtaaatatttgctaataacatattaattaggcttaataaattcgtctcacattttacaggtggattctgtaatttgttttattattagtctacgtttaatacttttaaatatgtgttcgtatatctgatgtgacacgctaaaactttacacgggatataaacacagcctaagctctgccttatccggcgcacgatcgaacggacatggcggtgcatgggagtgcgcgcgcgcagtgaatgagagcgcggtcagaaacgcggcgcgcgggtagcgtagcgcgcagataggggggccatcaatgcgcgtagctggaggtgcatggtgtggataggaacgagagcgcaacggatcaaaggccgggaagctggcctggatggatgcatctgatccgtccgtcgctccatcgatcaattccacaaacgttcaggcgcggacggacgtcagccgtcagaaaccgtatccgtatcaccgtatactccatgtacttacgtgtcgagcatacgtatatatacgtattaattggccgtaaagcgcgcggaatgaattcgtcgatcgatccggccgtattttgtgtatcgatggacgtgaagcaactatagtagtactccatcgtttttttttaaagtacgacgtcgctaactttttagctatttttgcctattcgttttatcaaaaaatatgattattatttattttattttgtcttgatttattataaaataggttttaagtatgatttaaatatttttatatttgtaaaaataaataaataagataaatgaatatacgttgataaaaaaattaacaacgtcgtacgataaaaaacgacggaggtagtacctatgtaagtaagcttccagcaaattaaacatgcatggatcgatggcggtaatctggaggcagtacgtgcccaccggttttgtttctctagctagttcggaaagataatattcctctctattcggacaaacaataactccaacattggagctactaggatatcttaattagcatgtattaccatcttcattcatatacaacgccgttaacttttcaataagataaatgatcaaaaatatatgtataaaagttaacgaaatcatctattaaaaaatagagggagtatttggttttaggatgaagcgtagtgggttatgtcgacgtttgatatcgtgactagggtatttggatggcatgggaatcgtcggtaccagggtatatgcgagattgaggtaaaagagatggagacatagatttttatacaggttcggaccccttatctgataggtaatagccatacatcctgttggccgaatttggtgttgctctttattcatctggatcacacaagtacaatatttgggaacctatctagctgtcgtcgacttggcggctagataaccaactcatagtcgacgatagggcggtcttcctcctcgaatatgaacccgtcgagatcagagatagacaccggacgggatatgtgtagactaatctctaatgtcgatatttggcggcgtattggcttgtgtgtatgttgtgtcttatggcttcgtagattgtggtgggtgtgtcccctctcctcctaggggggcttgtatttatacctataggtgcccccttgtccaagtaaaactagggagataaatatggatacgatctgagtagtacatatagtttccatatagaactctattcgtccttccttatccggaactccttctatatacgaggtttgtttccgtataagacatggtatttgcatagtatggggatcgttggtaccaggggtatacacgaaattgaggtaaaagagatggagacagggatttttatacaggtttgggcccctgaattgtcaggtaataaccctactcctgttggccgaagccggtcgttgcttttattcaccataatcacaccagtacaatatttgggttagcctatctatctgttgtcgacttggcggtctaaagtgttgactcgtagtcgacaacagggtagccttcctcctcgaattcgtatccggcgagatcaaagacagcgctatgtctctcttaatagtatccgtagacaccgtaggggactagccatgcttatctctgaagtcgatatctggcgtcttgtcttggcgtatgttggcttgtatgttgtggcttctgttgttccgtgtcccctctcctcctagggggccttgtatttattcccataggtgtccccttgtccaagtagaactagggaaactaatatggatacaatccgagtattacttgtcgtttccatgtagaactctattcatccttccttatgcggaacttctcctatatccgaaggttgtttccgtataagacatggtatgtggtgggtcctgccgagatttagtcaactattattaggtatgtggtatccatagccttgacagtatgtggtgggccctgtcgagtttagtcaattagtattgggtatgtggtattcataaccctgataggttagattcatccattttttttaaataaaatgattttattgatccgtttgacataatggataaagattatcctattttttaaagaataaatgttatatcagtgagagagagaaatgtgttgaatttgtccatttactttttaagaacaaggccaacccagatcttacagaaatattcatttcagtaatcatcctatccaacccattcataaccaaacagcctgaaaagtagattcgatccaacccgatctattccatcccttgaagcaaaagcatgccaaaagatattatataaaagtgagtataataaaatgatgaatgagttatatgttttacccccatcacatttttgcttaattaattagttgaagataggaaggagagataaaagaagcacacaacaaatttgtagccatacagattctaattaataaactttaggagagaaagatgtgagccattagctagacatgcttaaagttttttgatgttatatgtagtggtatttttatttaactaaagtacttaaataaattttgtcaattgaaattgagataaagaatgcacatatagaggtagtacttacgagtagtttctgctgctaaccgtatcaaatagtactacttcaaagcagtacaccgttacctggcgcaggtctttttccgcgcgcacgctttccaaactactacacggtgcatttttttaaaaataattctatagaaaagttgctttaaaaaatcatattaattatttttgaagtttaaaatagttaatacttaattaatcatgtgctaatggctcacctcgttttacgtatcttcccaatctctccaatccccttctcctcaaatacacccttagggtctgttcactttgatgccaaaaaaaccttaataaattttggcaaaaattttagtaacttgccaaaattttggcaggatttcttatacagttaccaaaatttagcagtaagctaaatgtaaccatttttttggcaactttattaaaacttggtaagaaggttgaaaatgacattaaagtgaacagggcccgtaattgttaccagattataaacacgcgcctgtggattattcacacgccgcgccgatgttttgtccccgatcgctatatatatacgcagcatgtcggagactcaagtggtcaagtcgaggcagtgtgcgttccaggttcaacggacctaaatgtcatgcgacttttgttatccaaatccgtaatgtgcttgcgcatgcagtgcttcaccggtcactcgccgtacgtcgcaaaacggacgtaaaccgttcaaacttgaacaacccgcgccacgtacgtacggtgcgtcggcgccgcctgatgataggatcgatcgatcgatgtatgatgtcgtttccacgtcagacaaaaaggaaaacaccatatatctatagatatatactgtagtactactcctgtatatatatcttacgtttctgatttatatattttgccctatcggaaaatactatactagcggctgcatatatagtgttttcaggagcatagggtgtaatatagaccaccaccgatttacgtgggtgagtctctccgatcctacagtaatatcatgtgtgacggtatcattaacatatggatttgttagatatgggacttatatatcagtcactaaaggttaaaaggttagagaacattactgcagagacattactagaaaacagtttacaaacggccaaaataggtttttccacgcagccattcaccctcatgtactccaagtcctgcgaaaatgcacgaattttacaagcagccatcggctccacctacgaaaatcatttttttcagataacctttcattcttcataggctctacagccacctacctgcgaaaacatttttggccaaaaaaaaaaaaatcctccgccaccaccctctacccaccgccgcccttcccctctggccggacctgagagggagagtgagggggaggggaggaccacaccaccgccttcgccacctatggccaacgctgtcgtcctctaggtcagacctggcatggatagggagacgaggggagatctgcaaggaagggaaggaaagctgcgccgctgccgggcgccaccaccactgtcgcccttccacctccagtcggatctggtagggtggaagggagggaggggaagggacctgccttagccgccaccgtcggtcccctcctctagcaggatctcacgcggggggggggggggggggggcgttgcctccgccgtcgcgtatggtggccgccgccaccgttgcttcctgcttctggtcggatctaagagggagagaggaaaggagggaggggaggtgagcgtcgcctccgttgtcgcttacggtggctgccactaccaccgctccccttctctggccggatctaggagggagggaggaatgagagggagcgtcgccttcatcgccgccacccctccccctccagccggatctgggagggagggaggcgagtggagggccgtgccgcctccgcttgctgtggccactgccatcgctcttccctcctccagccgaatggtggaggatgaaattaggataagggagtgaagggaagaagaggtgggtggagggtgaggtgagagtgagataaagggaagggagggtgaggtgagggagtcaaaggagatggacttagccgatgaaagctggctgcaggtggattttatgaggcctaaccttttagcaggcatttacgtccactattacagaaaccttaattggtgttggttaggaacaccacaaaagtgccagatttcccaaccaacacctagaaggcgacattgatgtggaggggaaataggtgccggttccatagccggtttagaaccgacacctttaagattccacgaatcaaaacaaagtcagctcgatttgagccgatgtatcgagcaactccccttcaccccgaccaatccaaggacacaagaacattcaagaacactaagaacactaagaatgggctgatgtcaaggagggtgccactgccaaaaccggggggtcgatagcctgctaccgcacatcgctgttaccgcctcccctcccactggatttggctgaggggagggcgtcgtccctgctgccacctcccctcccgccgccgcccgccgctgctacctcccctcccaccgccgcctccctcctgcacgttgtagcctccgcctcccctcctgctggatttggtagaggggagggagccgccgccgggccaccgacaccgggtcagggggatcgatgtagagagagagagagggaaaggagtgcagtgaaggagaaaggaggagaggataaagacggaagagagagagcgatgatgagggaaagataagcatgggaggccacctgttcggctcaactcgattttaggggtgcctttttttaaaaaaaccgacacctataatatataggggtgttgtttttaatttaccgacacctattatatatcaacggttcaattttttttttaaaaagggtatctacgtataggtgtcggttttttctttagaaccaacacctataattacttaaaggtattaattttttgtgttttcagcccgcagaggtgggaaaagtctataagtgctggttttagcacttctgacaactatagtaccgacctccacgtgccctttttttagtagtgggctcatccatggaaatcaattttcacaggcaaggtggtaagatgcccgcatgcaaaaataacccttatttttgtatgcggacctctttaagaccacacctgtgaaaatttttgcaagctggactagatttatggaatctttagttatgtttttcgcaaatgttgatttgctagtccgcctggaaaaataaaatcgtgatgttaggaaaaatcgtttttcttagtagtgaggatctgttttcgctggtttgcatacgcatggctggctcttgctggtgtttggaaaagccagattttggtctctcaaagtggcgccacgctattgaaaaccacacagattgattccgtggtaaaatatggatgattttgagaattgaggaccgaaaataaatgattttataggtgaggatcaaaagtgcacttttctatatttttattaaaagaaatcatatttttcgataggtatttgcaatgtaaattctatatttacatgataaatttgatatgtttatatcattatttttaaatctcacaatgttatgcttcatttcaggcacttgctataagaaaaactatgataaaaaaactttattatctatactccttgaaaagacctttgttgtggtagcagtgaatttgccactacctatcccacaattgtttttgcgatctttttacaaattagcccttgatattttatgatattatggaatagtccggcatttgtttcgaacaattgaatactatatatttaagtaagaaaaaagtgatactaacatattttgtcaatgtcggagtacgaaactcctcttgcaggtaagctaggtactccccctttgtgagtttggccggtgtgcaagttttgagctcgggtcctaattgcatacgagaataaacacaagcaagtatacaggtttgggtgatatagatgcataataccctattcctctatggtggactatgagtgatgaagcggattacagaagagatgcaaaagttctaagtgagaaggagaaaatccttccttgctcagtatctggctagcctagttctaagtggactatgagatctcgtcgatccatctcgacaaggatctcgtcggtaacgccagattcatatgttctctgtgttatctgtgtgtacccgctctagcaccttgaagatgtagatcttatatgtctccatacttttcttgacaccttaaagatgtagatattgtaggtttcgatacttttcttgacaccttgaagatttaggtggtgtttggatccagggacttaactttagtccctgtatttaaacactaatttagagtattaaatatagactacttacaaaactaattacataaatgaaagctaattcgcgagacaaattttttaagcataattaatccataattagagaatgtttactgtagtatcacataggctaatcatggattaattaggctcaaaagattcgtctcgtgaattagtccaagattatggatgggttttattaatcgtctacgtttaatatttataattagtgtccaaatatctgatgtgatagggacttaaaagttttattcccatctatacagggccttagatcattgtaggttctggtagggctcacaatgcactgagcatgcaagggaacgagacacccattcccacatctccgatagtctatggtatattataatatattttcttttacccaaagcaaagcatggggcattgtgctagtctcaaaagaagatagtagaataaaattaatactccatccgtctcaaaatataacatcttttcaacatcaatgttattccttcaacgcatcttacctacgtacctatctaccaatactaatttcttgtttaaaggcattttagtctttttcactccatctcaatttgcgttccaatggctaaatatggaattattttggtacgggagtagtactattataacatcatatttcaaaaagtttgacagagtacactctcaagcccgtcggcactagatccgccactcttgtactagcccatgttggattcgcttttcttgagctgtcgttctttttgaggggggcatcgagccacaacagtagttgtggcccaatgccaaggcccatggctccagttctgtctcctcagctgctgccatcttctccctttgccaacattgtcttggcaccgtccctatgttgcggtcgttgagatccacttgcactagatcaggagcagcatgccaacactgtcgctatccctagggcttcccttcctccttcgcagccgccctatatgtttcccctcctcctcttccacctccctagggcttcccttccttcgttgttgttggatgtgacatgaggagatgagagaaaggatctaggaggatgggtgacttgagtaaggatacaatgagatcgtgagggagagagaggaaatggtgatgtgggtgggggaagcgatgctatctagcaaggtggagggggggggggcaccccgagctcgtcatgggcgaatccaattgcccccaacttatcactccacatctggcgtcccgacctttgttggagtggcggtgtctgggactgcaagtgggaggtatggtgatgggagtgagcgcaacactgcgagcttggaaggagcaacggtcaaggcgtagtacagatgcgaagagagagaaaggataagggagaggagagagagacgtggtctggtggaccgattttcacatgtgaacatcttaagaatccgcctataaaaatgtgattatcacatatggtcctattaattagttggaacgtctgtaaaaactgatgttttcattcgattgtttgtaagtacacggaccttactattatcacaagcaaatactttaaggaaaaagtacgaattacccccttgaactatcatggtcgttcgatttaccccccttaactacaaaaccaagcattttacaccctcaattgtttataccggacaaataacccccctcaacactgtttcgagtggttttaacttgaacgtgcacacgtggcgccaacgtggaaattcagtcaacaaaaaaaataaaaaaacttcccaggggcccacctgtcatacccctccctcaacctaatccttccctgtcgcgcaatctctcttgtgcgcacacacttgggcgactagctatggaggagcaggcagaacgggtggccgacggtggccggctaaggaggagctcgcctggcgactggcagtggaggcagagctcgtccaggcggtccgacggcagcggcggagatcgctcgcgtggcggaggaggtggatcgggtggctggcagcggaggcggagaacacccaggaggccggcggcggaggtggagttcactcgggaggacgggcagctggcgactgacgcggagctcgcccgagaggtcgccggcggagaggagatcgcctgggtggcgggcggctgtcacgccctgaagtttcccccttcttctttctttaaaatttgttgaacaaatcatccgaagaaatggtttaatttaacctagagttgaatccctaattaataaatgcaattaataattggaaatggcattgtgggatttttcttgggttccacatgtcacaattgattaacaggtttttagtggaattttcagagccttaaaagtaattttaaccgattaaaaatgagcaagtgcaatatttttaatcccaggaaaaatcctttttctccttttcttttcttttccttccttttttctcttgatgggctgtcggcccatctctctcccgcacccctatccttcttgctgggccggcccaagccgcctccctcctctccctgggtcaccgacaggtggggcccacctgtcggccccgtcttcctcctccagctggcggcaatccccgctgtcgccgaaaccgtcgcgccgcagccatttcccgcccttctccgtgcccccactccgcccgcacctcgcgcccacgtcgccgccttctcccacgcctctcccgcacgcgcgcccaccccgcaccgaccgggattcaaatttgaatcctctctctctccccctcaccacctacccacgtcgccggccaaatcgggagggttcccggccacgttctcccctcccgtgccctataaatcgctccccgcgtccccctctctcgttttcgctctcgccgccctctattgcgcctcctaacgccaccccgtcgcgctcgcaaagctccgccgccgccaccactctctagccgtgtgccgccgctgctacagccgctgccacatcgcgtaaccgccgccgttagcttcgccgccgcgagagctacatcggccaccgttctcttgccgtgcgtcgccgccgtaccgctctccccacgtcacacccgagctccgctgccgccgcccatctccggcagtgcgccgccgccgctagagtcgtcgtcgcgccgcgcaaccgccgccgtcgcgctcaccgagcccgcccgcacctcggccgtcgtttggttgccgccgatcgacgccggagctccgtttcccacgtttgccggtgagctcgccattgtttctattttcggccgacgtttaaattctccgtggtcggcatctcctctcctaaccccctctccgccctctcctaggtgtcgctgccggccgtccgcgcctccgctcgccggtcgtcgccgccgccttcttccttcgcgtcggccgccgtgctcgccggtgaggaatcccctctcctccttcctttcctctctcccatgaggtccgccgccctccgcgcgtgcgccatcgtctttggccgccgccgccgccttcgcgccggccgccgccgtctcccgcggcgtcggtcaccgccggtgaccgcgcgcgctgccgccgctgccgcaccatggccggctggccgacttgagccgtgtcgagccgccagtctcccttccctttccctttttgagccactgccggtggggcccacatgcccgagcccccatctctctccccttgtgctgctgacatgcggggcccgcttgccggcgccgcccccccttcgctgacgtcagccctaggattatattgcgcaataaattgaataaggatttttctttattagtaaaaacacagtttatcttctaaaattcataactaattcatccgagctccgtttaagtccattcaagtcttagtaaattcataaaaatacaaagaatccattaaaaatggttctgtttcctgtttcagtagtcttatagcatgttttgcttgtgtgctttgtttgtcgcgtagatttcggccgtatcgtcgatccgcggtttctcgaagacgttgctgaggtctcatcagtgcgagagcaaggcaagtcatgcattacgtttgatcatattgtacccaatttacaaatatcctgcatttctattaagtgttgcattcttttacaatgtcatgtgggacgggtcctattactcagccatatattgtttaccttatgccattgataacttggggtatcaaaataactaaatgttggtttaggaaatgcttagccatgcttagctcaactagtacacaaatggggatcacattattacatagactttgactattagcatagctttggattggtgccaccgaaatggtgttagttaattaaaatacactgaatggtgggctgtgggtgcatggttttgctggtcacacccatggcagttaaggaccggttcacgggaaaccctgggagacttaccgtgcttaccacaagcgggagtgggtaactgcttgatctgaagtatagctcgaccctttcctaggcaccggtggcgagggtgggcgtgctggagttgggtcggtcggggtgtccggttgtccagctgccggattcaccgcggcgcaagaggggaccgcccactgccttttgaggggtggggatgaaaccttagcatggtgtggatggttagggaagggttatgcggagggtcttgtcatgatttccccctttgtagtatcatggtgatacttcggggcatggcgacatgtgtggaatcgtgtcttgtgggtacagttgtacacctctggccagagtaaaactattcgaatagccgtgctcacggttatgggcgatcaaccagattcaccgtgattagtctcacccctagtttagcttaatgaactggtgtagttcaggtggttgtttgggcctgttgcaacgtggtgtagcgttggacaatgattggttaatattgattaattactacaactattttactgctttcaacttctgcttttaaatgcctgctttatgcaaaagaacctttagcctcctttggatatatcctgcatcatacctcctcttccggtatgacttgctgagtacagtgggtagtactcagtcttgctctcttttcccccacaccagagctgaagatcttcattgttggagccgtcttgttgaggttggtttcgttgctgccgtcaagggatgcctgtggagtggagtcgccccgctgcagaattcaagcttccaagtctagctcattttatcttttccgctgcatttgtaatcttttctatttttgtaagacgtggatctgtatgtcaacaattatcgtttgtgtaccctggctggtcctggacagggatttaatgcacatttagcttagaaattctggtttgtgaatttctggacgtgacaagttggtatcagggccagccttgaccgtaggacaagccaactggaaacctaagagccctctgaacctcttttcatctgcatatgcctttttgcacctggatttgtttcgggaaaatttggggttttccctctttggtttgtgggaaaaatcttggtagttcattcggatcggatctttaaaattagttcagtctaggggtttagtaaaatttttatttggagtttattcgacagtcagttgggaatttatcgggtgatatgcattaggtcgtgtctatgttcgatagggtaattttatgcgtatcattatgactatgcatctattttatgcattaatttattgtttagtcagttgcattagtgtcttcatttgagttcatgaaaaatgttctatgcataaaaatcagtcatgcttggttatttatttgagtcatttgttgctttgtttatttggatttgagcatgcattgattcttatcctttgcctactttagatgtcggtcctattccttgatcgcaagcgccgctccgagcttcagagtcgccgcccttagctttatcgtcttcttagttttgtttgcttgctagtttccgtacttaggtttgttgcttgtgggttagtcggcggttgatatcatgtgtcagtggtatggctgcctcaattaggagttgtttgcctttttttcagtgttttaatcaagattaagataattgcacttaaatttataagaaagattagtttctgagccccctgtttttcttccttttctcatatttctacctatccccctccagatggtgaagacaaggaatggttcccgtgactctaacaacgccagtggcagcgaagagcagatcagtggagcacgtgccaacagtgcatctgacaatagtccatctccaccgcccgagaacccaacaattgctcaggtgttggacaatcagactcagatgatgacaatgatgatgcaacagatgcaacaacagtaccatcaggtgttgcagcaggtgcagcagcaagcatagcagcagtagcagaacctgcagtttggtcttccacctccccagtccaaaatgttggagtttcttcgtgtcaagccgcccactttctcaagcaccaccaacccaatcgaggccaacgactggcttcatgctattgagaagaagctgaatcttttgcaatgcaacgaccaggaggaggttgcttttgctacacaccagctgcaaggtcccgcttctgtttggtgggacaactacatggtaacccgtccaactgggacagaagttacctggtcagagttttgtcagagtttcaataaggcacaggttcccgagggaattgtggcacaaaagaagagagagttctgttctttgcagcaaggaactaggacagttattgagtatttgcatgagttcaaccgtctcgcgcgctatgctcctgaggatgtgcgcacacatgccgagaggcaggaaaagtttctgtctggtcttgatgatgaattgaccaatcaactgatctccaaggattatgaggactttgataagattgtggacaagactatccgtcaggaagagcagtgtaacaaaataaaccgtaagtggaaggcagctcagttcaggactccttaggggaagagtcagaagcctcgcttcacgatgagacatcagggtggaccttccaccatgattatccggcaacaccgtccctaccaccccggtaatttcaacggcaccaacaacagtgacaatcacagtaacagtgagcagcacagcctcaactctactccaagtccactaatgattctagctcagtcagttcagtcagctctgccagcttagccagaacagaccaagaagtttggagaaatgcccgaactctgcttcaattgtaacaagtccggacacatggtatgtacgtgcccgaagccaagacgtgccggactcaagtttgttcaggcccgtgtcaatcatgcatctgtagaggaggcgcagtcaacaccagaggttatattgggcacatttcctgtcaactcgacactggcagtaatattgtttgattctggtgcaactcattccttcatttccaagcgttttgctggtgcacatgggttatctttagtgaagcttaagataccaatgcgagttcatactcctggaggtggcatgaccacaactcactactgcccatctgtgacagttgaaatccaagggttgattttttcagccaacctcattcttcttgaatccaaggatctagatgttattattggaatggattggttgacaaggcatagaggagtgattgattgtgctagctgcaccatcaagttgaccaatgcgaagggagaagtggtaaccttccagtctccagtgccgcagaagacagagatcagtttaaactaggctactggcgaagaacaagaggtagcagtggagaaaaccactaagaagttggaggatattcccatagtcagagagtatccagaggtttttccagatgatctgacaataatgccaccaaaaagggatatcgagttccggattgacttggtacctggaactgcaccgatccacaagaggccttacagaatgggagccaacgagttggcggaagtcaagaagcaagttgatgaacagctacagaagggatacattcccccgagcacgtcgccttggggtgctccggtaatttttgtggaaaagaaagacaaaaccaagaggatgtgcgttgactaccgcgcactcaataaggttactattaagaacaagtaccctttgccaaggattgacgatctgttcgatcagttgaaaggagctactgtgttctctaagatagacctgcgatcaggctatcaccagttgaggatccgcgaagaggatattcgaaagacatcattcatcactcgttatgggttattcgaatgcacagttttgtcttttggactcaccaatgcacctgccttcttcatgaatttgatgaacaaggtgtttatggaatttttctagacaagtttgtcgtggttttcatcgatgacatacttatctactccaagtccgaggaagaacatgagcagcatcttcggttggtacttgaaaagttaaaagagcaccagctatatgccaagttcagcaagtgtgacttctgacttaaggaagttcagtttcttggtcacatcgtgaatgctcaaggagtagctgtggatccagcaaatgtggagtcagttaccaagtggaccccaccaaggacagtcactcagatccggagtttcttaggactcgcgggctattaccgccggttcattgagaacttctctaaaattgccaagccaatgacccagctattgaagaaggaagaaaagtttgtctggtctgttgaatgtaataggagttttgaataacttaaacgacggttggtatgtgcactagttttaattttgccagattagacgaaagatttccaggtttattgtgatgcatctcgccaggggccaagatggcaaagttgtttcttatgcttcacggcagttgcgtccgcatgaaggcaactacccgacccacgagttggaattggccgcagttgttcatgctttaaagatctggaggcactacctcattggtaaccgttgtgaggtatatacatatcacaaaagtctaaagtacatcttcacccaacctgatctaaatctccgacagcgaagatggttggagctaattaaagattatgatatgggtatacactctcatcccggcaaggctaatgtggtagcagatgccttgagccggaagagttattgcaacgtcgcatgggtagaggagctatgctgtgaggttcaacgtgatttggaacatctgaaccttggtacagttgagcatggattcgtggctgccctagaggcacaacccacactggtggagcaggttcgcatagctcaggcaagcgatcctgagatagcagaactcaaaaagaacatgagggttggaaaagcccgaggttttgttgaggacgaacaaggaacaatctggatgggagaaagattgtgtgtacccgaaaacaaggagttaaaagacctaatactgacagaagctcatcaaacccaatattcaatccatcctggcagtaccaagacctcaaagaaaaattctggtgggtcaacatgagaagggaaatagctaaattcgtcacactctgtgacatttgccaacgagtaaaggcagagcaccaaaggccagcaggtttgctacaaccccttcagattccagaatggaaatgggaagaaatcggaatggatttcattacgggtttgcccaggacatcatcggggcacgattccatttggggagtcgttgaccgactcaccaaagtggcttacttcattccggtgcacactaccaactcagggaagaagttagcagaactttatctcgcaagaatcatgtgtttacatgggataccgaagaagatcgtatctgatcgagggagccaattcacttcaatgttctggcagaaattgcaagaagaattgggaacccggttcaacttcagcacagcctaccatccacaaactaatggccagaccaagcgagtcaatcaaatactagaggatatgttgagactctgtgcgcttgattttggtggagcatgggacaaaagcttgccgtatgctgagttctcctacaataatggttaccaggctagtctgcaaatggcaccctttggagcgctgtatggacggaggtgtcgtactccgctcttctgggatcagaccggggaacgccagctgtttgggacagaagttttaaatgaggtagaacagaaagtcagagctgtcagggaaagattgagaatcgcgcagtctcgacagaaaagctatgcagacaatcgtcgaagggagctcatttttgaagcaggggattatgtgtatcttcgcgtcactccactcacgggggtacaccgcttccaaaccaaaggaaagttggcactacgctttgtgggaccatatcggattttggaacgcagggatgaagttgcttaccaacttgagcttccctccaacatgcttggcatccataacgtgttccacgtctctcagttgaagaagtgtttgagaattcttgaggaacaggcaagtccggatcacatcgaaatccaagaagatctgacctatgtggagaagccagtccacatccttgagaccagcgagagaaggaccagaaacaaggtaatcaaattctgcaaggttcagtggagccaccactcagaagaagaggccacttgggataaagaagatgaattgaaggccgcccatccgcacctcttcgccagctcttccgaatctcggggtcgagattccgttaaggagggtaggtttgtcacgccctgaagtttcccccttcttctttctttaaaatttgttgaataaatcatccgaagaaatggtttaatttaacctagagttgaatccctaattaataaatggaattaataattggaaatggcattgtgggatttttcttgggttccacatgtcacaattgattaatgtaacgccccgattttcgttcgggaataaaaatcaattaataatacatcttctagaaattaaataaaagttaaatcaacttaatcaagtgaattattgagggaattaaaaatttcctttaaaaattattggccgggaatattttgtaatattctttgtgccctaatgtactctccgaaattttccgtgaattttcggagctcgagaaatagttttaatagcacaaagatcattgcatcaattaaaataaaaagaaaacaaataaaatcctccttcctctctttgggcccctttcggcccaatccctcctttctctcccgtggcccgcgcgccccctttctctccctctcgggccggcctcctccctcggcccgctcggctctctctctccctcaagtccgttctgcctccccagccggcctctccctccctctctctccgacaggtgggacccgtggaccccacctgtcatccctttcctccagctccaactgccgccatggccgcctgagccaccccacgacgccgcttcctccgcgcgcctccacgctcccgcgcgcgtgcagacgtggtccaccccacgtcctccccttcctccactttccccccccaaaaatcggcgccgttcgagccccactcgcccacgtcgccggagctccatccgccggccgttgccgcccgccacggccacgatctccccctccggggcctataaaaatgcaccccgacctcccctcatccgtttccccaactcactgccccctcccgcgtgctctctcgagctccccacgcccctcccgtgtgccaccgcacgccgacgaccctccagccgcgcgccgtcgccgcttccgtcgcccccgcactgcgccgctgccacctatagcatcgcagcgtcccaccgcaccccggcatccactccatttcccctccccgcctctgaaacaccgtcgccacgcgcaccacctctctccaccgtctccgccgcttggcgccgctcctaaccaccccaagcagcgccgccgccgccgcttgcttcgcagtgccgaggagcacctcggccgccgcttttcacggccaggatcccgccgggacacggttcccctcgcgccggtccttccagccgccgtccgccggttcccgctcgtggaacgccgccgggccgccgttccgccttcgtcccgaggagcgccgacgccgagctccccgcctttccccgcccctcgtcgccgcgtccttggtgagctcctcttctccctccttgcctccctcctctgtctcctgtgcgcgctttcgcgccggtggccgccgccggcgaccacctggccatgcgccgccgccccgctcgcctgggccacccggacccccccttgtcgcgccgcgtcgatcttgtgcgccgccaccgcccatgcgtgccgcctctcccgcgccgcccgtcggtcgccgtcgccggagaccgcgctaccgccgcgccatggctcagctaggccggctttgtgccgtgctgtgccccagccgcgccgcccctggccgcccgatcggcttgggccgatccggaccgtcggttcccgtggaccggtggtggaccaccttggtggtcccggtccacggtggaccggtgcccttgtgccgctgaccggtggggcccacttgccggcgccgcccctcccctttgatgacgtcagcaaccctcttttccctttggaaaaataaataataattgcgtcataattcgttaataattctagaaattcatttaaatggctcaaaacttctaaaattcatatctaattcattcgaactccaaattgggccattcaaattgcaaaattcatctaaaattgagctctacatgtttgtttactttttatgtactgtttccttggtttttattagagtttttccatcttaataagtcgacccaatacactgtagttcaggtgggttggctgggcctgttcaacgtggtgtagcgttgatcagtggagatttaatgttactctaattactcaacagttttattgctttgctcaataaaatgttttacaaccgcctttatgcaaatagccacaaacccctccttgtatccccttgcacgtctgcatcgttggtgtggcttgctgagtacggtggttgtactcagtcttgctattattcccccttttcagaagtgtagtgcttctgagctgaagatggaattagaggaccaaggcttagaccccagttgagttttgcctgtggagtggagctgaagccccgctaggatcgcctttttccgctgctgtcgttctgttccggtgtgaggactaagtgcctattccgtaagtattttacgctttatttacgtttggaactgtatattacttgtcgttttgtgtaccctagctggtcctggacagggatttaatacgcaaaatagtctggaaatttgggtgaaatttctgggcgtgacaattaacaggatttttagtggaattttcagagccttaaaagtaattttaaccaattaaaaatgagcaagtgcaatatttttaatcccaggaaaaatcctttttctcgttttcttttcttttccttcctttttctcttgatgggccgtcagcccatctctctcccgcgcccccatccttcttgatgggccggcccaagccgcctccctcctctccccgggtcactgataggtggggcccacctgtcggccccgtcttcctcctccagccggcggcaaccgccgctgccgccgaaaccgccgcgctgccgccatttcccgcccttctctgcacccccactccgcccgcacctcgcgcccacgccgccgctgtcacgcccagaaattcacgaactagaatttctaagctgaatgtgcattaaacccctgtccaggaccagccagggtacacaaacgacaattgttgacatacagatccacgtcttacaaaaatataaaaggttacaaacgcagcggaaaaagataaaagcgagccaatcctgaagacttgactcctgcagtggggcgattccactccacaggcatccttaacggcagcgacgaaaccaacttcttcgagacatcttcaactgaaaagaacttcaactctggtttgggggaaaagagagcaagactgagtactacccactgtactcagcaagtcataccggaagaggaagtatcagcatgatatatccaagggaggctaaaggttcttctgcataaagctagcatttaaaagcagtagttgaaagcagtaaaacaattgtagcaattaatcaatattaaccaatcactgtccaacgctacaccacgttgtaacaggcccaaccaaccacctgaactaaccagttctatgagataactaggggtgagactaatcacggtgaatctggtcgaccgcccataaccgcgggcacggctattcgaatagttttactctgatcagaggtgtacaactgtacccacaagacacagccccacgacacgtttccgtgcaccgacatgccaccataacataccggaaagaggccgtgacaggacccttcgcataaaccccctctaactgatcgcaccacaccttagggtttgcccccctccccagcaggcaatgggcagccccctttcgtgccgcggtgaatccagaagcccatcaaccggacaccccagccgacccaactccatcacgcccaccctcgcctgggtacgtcggctagaggaaagctacacgacaagcctagccgttgcccacgctggcttgtggtaagtacgataagttcttccagggcctcccgcgaaccggtctttaattgccatgggcacgactagtaaaaccatgcacccacagcccaccatgtagtgtattttaattaaccaacaccattgcggtggcactaatccaaagctatgccaataatcaaaatctatgctttaatgtaattcccccattttgtactagttgaactaagtatggctaagcatttcctaaaccaacatctagtcattttaatacccaagttatgaatggcataaggtaaaaaatatatggctgagtagtaggacccatcccacatgatatggtaaaacaatgcaatatttaacagaaatgcaggacatttgtaaattgggtacaatatgatcaatggtaatgcatgacttgccttgctctcgtactgatgagaccacagcaacgtcttcgagaaaccgtgggtcgatgaaacggctgaaatctacgcgaccaacaaagcacacaagcaaaacatgctataagtctactgaaataggaaacaaaaccatttttaatggattctatgcatttttatgaatttactgagacttgaatggacttaatcggagctcggatgaattagttatgatttttagaagattatctgagttttactatacaaagaaaaaaaacttaattatttattgcgcaataataaatcatggatgacgttagcaaaaaggggggtgcggctcaccgacatgcggggcccacccggcagcggctcaagggggaagaggtggcaccggttggtgggtgggccccaccgggcagtggctcaagggggagagggcgacgcccggtcggctcggctcggcttcaaaccggctggccggttaggtgatgcggcggcggcgagcggccaccgatggcggcgaccggcggcgcgggagacggcggtggctggcgaggagatggcggcacacggccgaagcggcggcgcggacaggaggcggtgacgcacacgaggaagggagagtaaaagagggggagggagtcctcaccggggattcggccggcgtgggtgaagactacggcagacggtggcggcaagcggcggacggcggggcgcgcgggatggacgagacgggcctcgatctcacgaggccaacggcggcaacagagcggcgcggcgacggcactagcgacggctagcggcggttggaggcggcggtaggcagcggcgcgtggggagagcggtgcggcggcggcacgcggcaagcgagcggcggccgggatagctcccgcgacggcgaagctagcggcggtggcggcttggtgcggcggtggctatagcggcggcggtgcacggctatttagggattcaactctaggttaaattaaacaatttcttcggacggtttattttaccaattttaaagcaaggaggggaatttcaaggcgtgacaaacctaccctccttaaacgaatctcgaccccgagattcggaagagctggcgaagaggtgcggatgggcggccttcaattcatctactctttcccaggtggcctcttcctctgagtggtggctccactgaactttgcaaaacctgatcaccttgtttttggtccttctcttgctggtttcgaggatacgaatcagcttctccacatatgtcagatcttgttggatgtcgatgtgctctgagttagcttgttcctcaggtaccctcaaacacttcttcaactgagatacatgaaacacatcgtggatagctgccatgttagatggaagctcaagctggtatgcgacttcacctctgcgttccaaaatcctgtatggtcccacaaagcgcggtgccaatttgcctttcatctggaaccggtgtactccccggagcgtagtgacacgaaggtacacataatcccctgcttcgaaagtaggctctcttcggcggttgtcagcataactcttctgccgagactgggcgattctcaatctttccctgacggtcctaactttctcctctgcttcggttagcacttctgtcctaaacagttggcgctcacctgtttgatcccagaagagtggcgtacgacacttccggccatacaatgcttcaaacggtgccatttgcaaactggcctgatagctattgttgtaggagaattcgacatacggtagacttttatccaggctccaccaaagtcaagtgcacaagctctcaacatatcttccaagatttgatttactcgcttggtctgaccatctgttttgtggatgataagccgtgctgaaattcaaccgggttcccaattcttcttgcagcttctgccagaactttgaagtgaactgacttcctcgatcagatacaatcttcttaggtaccgcatgcaaacacatgattcttgaaaggtagagctctgccaatcttttcccagtataggtagtgtgcactggaatgaaatgagcgaccttcgtgaggcgatccacgactactcaaattgaatcatgccctaacgatgtcctgggcaacccagtgatgaaatccattccgatttcttctcatttccattccgggatctgaaggggttgaagcaatctgcgggcctctgatgttctgctttgactcgctgacaaacatcgcaaaacacgacaaattcagctatttctcttctcatgctggcccaccagaatttctctttgaggtcctggtacattttagtacttccgggatgaattgaatactgagtttgatgagcttctgtgagtatcagatccttcagttctttgtcgtcaggtacacacaatctttctcccaaccagattgtgccatgctcatcctcatgaaaatctcgggcttttccaaccctcatattccttttcagctcagctatttcaggatcatttacctaaggtgctctgacttgatccacgagcgtaggccgtgcctctagggcagctacgaacccgtgttccatgatacccaaatttagttgctctagatcttgctgcaatttgtcacacatgccttcggtacatactgcattgcaatagctcttcctgctcaaagcatctgctaccacatttgctttacctagatgataatgtatccccatgtcataatctttaattaactccagccatcttcactgtcggagattcaagtcaggctgagtgaagatgtacttcagactcttgtggtcagtgtagacttcacagcggttgccaataagatagtgccgccagattttcagagcatgaaccattgctgccaactcaagatcatgagtaggataattgctttcgtgtggacgcaactgtcgcgaagcatatgcgaccactctgctttcctacatcaaaacacatcctagcccttggcgagatgcatcacagtagacctggaagtctttcgtctggtcttgcagaattagaacgggtgcagatactaacttcttcttaagttcttcaaaaccttggttgcactcagctgaccacttgaacttttcatctttcttaagcaactgagtcataggcctggcaatcttggagaaattttcgatgaaccgacggtaatagcccgcaagttcaaggaaactccgtatctgagaaactgtctttggtggggtccactttgtaactgactccacattcgatggatccactgccacacgttgagtagtaatgacgcgacccagaaatttgacttctgacaaccagaagtcacacttactgaacttggcatataactggtgctccttcaatttcttgagtaccagacggagatgttgctcatgttcttcttcagactttgaatagataagtatgtcgtcaatgaacaccacgacaaacttgtcaagaaactccataaacactttgttcattaagttcatgaagaaggccggtacattggtgagtccaaatgacataaccgtgcactcaaaccacccacaccgagtggtgaaggctgtcttgggaatatcctcttctcgaattctcaactgatgatagcctgatcgcaggtatatcttggaaaacaccttagctccttttagctgatcaaacaggtcatcaattcttggcaacggatatttgttcttgattgtgacctcattaaggacgcgataatcaacgcacatcctcttggtcttgtctttcttctccacaaagataaccggagcaccccaaggtgaagtactaggtcggatgtatcatttctgcagctgttcatcaacttgcttcttgacctctgctagctcattagctgccattctgtatggcctcttgtagatcggagcagttccgggtgccaaatcaatccagaactcgatttctctcttcggtggcattgtagtgaggtcttcaggaaatacctcaggatattcttgtactattggtatatcctccaacttcatgggacatttttcctctatttctgtctgatcctcaatagcagcctaattcagactcgctacggacttctgcgacactggagaacggaatgtgatcttctcccctttatcgttggttagggtgatagtgcgacttgcacagttgatcactcccttgtgtctggtcaaccaatccattccgagaatgacatctaggtctttggattcgagaaggatgaggttggatagaaatggtgatcttttgatctctatagtcactgaggggcagtagtgtgcggtgttcaggtcatttccagggatatgaacccgcatcggtattttaagttccactactgataatccatgtgtcccagcaaatctcttggaaatgaaagaatgtgaggcaccagaatcaaaaagaacagtggctggatatgagttcactggaaacgtgcccagcacgacctctggtgctgcctgtgcctcttctgcagacgcatgattaacgcgggcctggacgaacctaggtccagcgcgcttcagcttcggacatttgccagcaaagtggccgtgcttgccacagttgaagcagggtcctggctttcctctggactccttcttgagctgttctgactgagccggcatagctggtagatctgactgagctggttccattaatgggggtggagttgagttgtggtggtgctgctcactactgttgtgactgccaccgttgtagtcgttgttgaagttactcgggtgataaggacggtgctgatggacgatcagggtggaaggctcacctagctgtcccgtcatgaagcgaggcttctgattgttcccctgaggaaagctgatctgagctgcctttccttttcgatccattttgttgcgttgttcttcctgacggatagccttgtccacaagcttctcaaaatcctcatagactcctgagatcagctgttggtcaattcatcatcaagaccaaacaaaaacttctcttgcttctcagcatcggtgcgcacgtcctcaggagcgtagcacgcaaggcggttgaactcatgcaggtattctgtaactgttctggttccttgatgcagtgcgcggaactctcttttcttttgtgccataatcccctcaggaatctgtgccttcctgaagctttgacaaaactctgcccaagtaacctccgttgcatccagacgggtcaccacgtagttatcccaccaggcagaagcgagaccttgcaactgatgtgtagcaaaaacaaccttctcttggtcgttgcattgcagaaggttcagcttcttctcaatagcacggagccagtcattggcctccattgggttgctggtgcttgagaaagtgggtggctagatacgaagaaagtctaacagcttggacaggtgtgatggtggaggaccagactactggttctgctgcgcctgctgcaacatctgatggtaatgttgctgcatctgttgcatcatcattgtcatcatctgagtgaccgttgggttctcgggcagtggaggtggactactgctagatgcaccactggtttgagctacatcgatctgctcttcgctgccactggtgtcgctggagtcacggggatcattccttgtcttcaccatctggacgaggataggtagaaataagagaaaggaagaaaacagatggctcagaaactaatacttcttatagatttaagtgcaattatctgacttgaattaaaacactaaaaaggggcaagcaactcctaattaaggcagccataccactgacacatgatatcgaccgccgactaacccacaagcaacaaacctaaacacagaaactagcaagcaaacaggctaagaagacgataaagctaagggcggcgaggcggcgactctgaagctcggagcaacgcttgcaatcggagaacaggtctgacatctaaggtagacaagggataggaatcaacgcatgctcaaatccaaatttaaacaaaacaacaaatcactcaaataaataaccgagcatggtgatttttatgcatagatcatttttcatgaacccagacaaagatactaatgcaactgactaaacgataaattaatgcacaaaatagatgcatagctataatgatacgcataaaatgtccccatcgtacctagacacgaattagagcatatcacccaacaaattcccgactgactgccaaataaattccaaataaagttttgctaaaaccctagactgcctctagctgagaaatccgattaaatagcgatcaagatttttcccacaaatcaaaagagcaaaccccaaaattttcccgaaacaaatccaagtgcaaaaggcatgtgtagatgaaaaggttttagatggctcttagggtttccatttggcttgtccaatggtcaaggtcggctctgataccaacttgtcacgcccagaaattcacggaccagaatttctaagccgaatgtgcattaaacccctgtctaggaccagccagggtacacaaacgataattgttgacatacagatccacgtcttacaaaaatgtaaaaggttacaaatgcagcagaaaaatataaaagcgagctaatcctgaagacttgacttctgcagtggggcgattccactccacaggcatccttgacggcagcgacgaaaccaaattcttcgagacatcttcaactgaaaagaacttcaactctggtgtgggggcacgactagcaaaactatgcacccacagcccaccatgtagtgtattttaattaaccaacaccattgcggtggcactaatctaaagctatgccaataatcaaaatctatgctttaatgtaattcccccattgtgtactagttgaactaagcatggctaagcatttccgaaaccaacatctagtcattttaatacccaagttatcaatggcataaggtaaacaatatatggctgagtagtaggacccatcccacatgatattgtaaaacaatgcaatatttaatagaaatacgagacatttgtaaattgggtacaatatgatcaatggtaatacatgacttgccttgctctcgcactgatgagaccacagcaacgtcttcaagaaaccacggatcgacgaaacggccaaaatctacgcgaccaacaaagcacacaagcaaaacatgctataagtctactgaaacagtaaacaaaaccatttttaatggattctatgcattttatgaatttactgagacttgaatggacttaatcggagctcggatgaattatttattgagctctgaaaattccattaaaaatcctgttagcatattttgacatgtagaatccaagaaaaattccacatgccgattccgattattatttgcatttattaatttagggattcaactctaggttaaattaaacaatttcttcggacgatttattttacaaattttaaagcaaggaggggaacttcagggcgtgacagctgccctctcccacgcttctcccgcacgcgcgcgcaccccgcaccgaccgggattcaaatttgaatcctctctctctccccctcaccaccttcccacgtcgccggccaaatcgggagggttcccggccacgttctcccctcccgtgccctataaatcgctccccgcgtccccctctctcgttttcgctctcgccgccctctcttgcgcctcctacccccaccacgtcgcgctcgcaaagctcctccgccgccgccgctctctggccacgtgccgccgctgctacaactgctgccacatcgcgtaaccgtcgtcgttagcttcgccgccgcgagagctacatcggccaccgctcgcttgccatgcgtcgccgccgtaccgctctccccacgccacacccgagctccgctgtcgccgcccatctccggccgtgcgccgccgccgctagagtcgtcgtcgcgccacgcaatcgccgccgtcgcgctcaccgagcccgcccgcacctcgaccgccgtttggttgccgccgattgactccggagctccgttccccacgtttgccggtgagctcgccattgtttctattttcggctgacgtttaaagtcgccgtggtcagcgtttcctctcctaaccccctctccgccctctcctaggtgtcgctgccagccgtccgcgcctccgctcgccggtcgtcgccgccgccttctttcttcgcgccggccgccgtgctcgccggtgaggaatcccctctcctccttcctttcctctctcccatgagcgccgcctccctccgcacgtgcgccgtcgtcttcatgccggcctccgccgtctcccgcgccgccgccgcaccatggccggccggccgacttgagccgtgccgagccgccagcctccctctcctttcccttttgagccgttgccggtggggcccgcatgcccgagcccccatctccctccccttgtgctgctgacatgcggggcccgcttgccggcgccccccccttcgctaacgtcagtcctaggattatattgcgcaataaattgaataaggatttttctttattagtaaaaacacagtttatcttctaaaattcataactaattcatccgagctccgtttaagtccattcaagtctcagtaaattcataaaaatacaaagaatccattaaaaatggttttgtttcctgtttcagtagtcttatagcatgttttgcctgtgtgctatgtttgtcgtgtagatttcggccgtttcgtcgatccgcggtttctcgaagacgttgctgaggtcttatcagtgcgagagcaaggcaagtcatgcattacgtttgatcatattgtacccaatttacaaatatcccgcatttctattaaatgttgcattcttttacaatgtcatgtgggatgggtcctattatgcagccatatattgtttaccttatgccattgataacttaggtatcaaaatggctaaatgttggtttagaaaatgcttagccatgcttagctcaactagtacacaaatggggatcacattattacatagactttgactattagcatagctttggattggtaccaccaaaatagtgttagttaattaaaatacattgaatggtgggctatgggtgcatggttttgctggtcgcacccatggcagttaaggaccggttcacgggaaaccctgggagacttaccgtgcttaccacaagcgggagtgggtaactgcttgatctgaagtatagctcgaccctttcctaggcaccggtggcgagggtgggcgtgctggagttgggtcggtcggggtgtccggttgtccagctgccggattcaccgcggcgcaagaggggaccgcccactgcctttttaggggtgggggtgaaaccttagcatggtgtggatggttagggaagggttatgcggagggtcttgtcacgatttccccctttgcagtatcatggtgatacttcagggcatggcgacatgtgtggaatcgtgtcttgtgagtacagttgtatacctctggccagagtaaaactattcgaatagccgtgcccgcggttatgggcgatcaaccagattcatcgtgattagtctcacccctagtttagcttaatgaactggtgtagttcaggtggttgtttgggcctgttgcaacgtggtgtagcgttgaacagtgattggttaatattgattaattactacaactgttttactgctttcaacttttgcttttaaatgtctgctttatgcaaaagaacctttagcctcctttggatatatcctgcatcatacctcctcttccggtatgacttgctgagtacagtgggtagtactcaggcttgctctcttttcccccacaccagagctgaagatcttcatagttggagccgtcttgttgaggttggtttcgtcgctgccgtcaagggatgcctgtggagtggagtcgcctcgctgcagaattcaagcttccaagtctagctcgttttatcttttctgctgcatttgtaatcttttctatttttgtaagacgtggatctgtatgtcaacaattgtcgtttgtgtaccctggctggtcctggacagagatttaatgtacattcagcgtagaaattctagttcgtgaatttctgggcgtgacagcggctgaggcgaagctcactcgggaggtcggtggcggaggcggggctggtgccgcgtgcggcagatagctcactctcccgtggtggccctccgcgccgcgcccaccacccactctcctccgctgctaccttctccgttcggaccaccgccgccgccttctccgcccggaccaccgctgctgctaacttctccgcctagaccatcgccgccgctgcactgcaagacaggggagggaggtgtgctgagagacggtggcgggctcgtcgccgccttcatgagagctatggcttcgccaccgagggatcccgaccggcggcgccacaacggaaggtccaggcctagacttgcgccgttgcctgcccttctcgctcgtcgggattgatgggcgagacacgaccgagggtgaggatgtggcggggacgctgccttccgccgaggatgttgctaccgccgttgccgcctaacgcacgccgtcttccttcgctatctcatggtggccgtcaccgccttcctctacctcttcactgctacagtgtggttggggggggggacagagatacattgacagagagagtgcgatggaaagaagaagaggtggaagaagatgctgacatatggagcccactgattattattattattatttactatattgccacgtaggattaaaactgcttcgggttgattcggggaggggggaggtgattcatccagtttgtaaagttcggaggtgtaaaatgtatggttttgtagttaagggggtagatcaaacgaccataattgttagggggtaattcgtactttttctatacttttatagcctgactgtagaaaggctgtaaaaataagaccttgatgtctataaaactattttggtagtagtgatctcttcttcgatattcaagtattcgacgaaattaataactaccggagaggaaataaatacatccatacataaacacgacacatcgagatcttctggaagaaactaaaattacaaagcatccgcgcatgcggctggtcggtcgatcggacagacaggaaggaaggcaggccggccgcgaggatcgtacatcgtcagtgcgctcgggattgctagtacagcgcgtgcgctgggatataggagcacgatatatccgtggccggacgtgtgtctctccttgctttggcggctccacgcgtcgcccgcgccggcctgcagcctgcaggtggtggtgccgtcccgtcccacatcatatcaaccgatcgagagtccgaacgccgatcgatcgatcgcacctaacgtacgtacgtgacgttttttgctgccatggctcgcccgacatcgagacatgcgtatggcgaccatgtgtgcgaactgcgtactatacgttgcgctctcgtgcaccgtgttcgcaacttcttttcctccgtcgtgacgtccaccatgcatgataatatgatatcacgcgagaatgctcgtgggacaatcaacagtaaggaggatgtttggaacccactcacagtttgatttactgttactctctctctgtgtgttacatattacatattacaagtcgttcgttttgactttttcttagttaattttatcaaatttaatttagtttatgggaaaatttaataacatctacaacatgaatttaatttcattcaaactaacatttgatatatcttgataatatgtatatttgttgtgaaaatattgctaatctttttataaatttaatcaaacttatagaaagtttgaatagaaaaaaaaagttaaaatgatttataatatgaaacggatgaaatataattgtggctcatcacatttttttcattaatatgtcccgcatattatttagactcaactttcttggtgactttatgcctaactatttattcactacttcctccatttcataatataaggtacaactactttttagagttgttccataatataaggcatacatgcatgcatgtcattaactaacacatcttctccactaaaatattattatttaaattctccaccatcaagatctctaattttattgggtgcatgtattgcatttattagattaatccaaactatgagatgataataattattttttaatctttgagctaagggtggttgtaccttatattttagaatggagggagtatcttttataactgtcacaatttgtgtattcttaattgtgataaagcatggctagcaatcaaacacctctaagtgacacgaccgaccaacctaaataaacatacttgttaactacttgcacgtgtgttgtcctccaaaattaggccacgcacctagctagctactccctccatcccataatgtgagattttaagtttttttttattatttgaccactcattttattaaaaaaatttgtgcaaatataaaaaacgaaaagttgtgcttaaagtactttagataataaagtaagtaaaaataatgataatttcaaaattttttaaataaaacaagtggtcaaacagtacaagctaaacacaaaatcccttatattatagtacggagggattacgatttaattttagataaagaggcacctagctaatacgaatgcatgcatatccgtgtgtgcatatatagatgatctcttgagcatatgtttcgcgtgcaacttacgcccctactagctttagctgcggtcaatcgagcgagttcattcgatcgatctgcatgcgtgcgacgaggaataattaaattaaacttgtctatgtgtacattgggagaaattacttccaaacgatcgacctataggggaattctttttaagtgatgcaagatattatttaatacctgcatctaaaagatacaatctataggttatagatgtccagttggtagcatagtgaggatatggggatatgaattcaacactgaacatggaccaaaaaaaaaaaagaattcaacactgaagtccgtgtttgcctcctaggcacgctgacaaccttctttacattcaaagaaattaattgatatgatgtggcaaattgtgaaaactaattatatacaatattactcctacaatgtttcaagcctatattttaaaaccacattccttgaagaataacctgaaaaactagacattaagctatggcgatccacaagtactaaatatttaaacaaataatattaactctgtacttatcaattgaggatttataattattgaatcataaaaatgttgtagttgacaacttggtattttgaattttgaaattactaaatcctaaagaaaaactaattttgatactcaaacaaaagtacagctcaatattaaaccattaattattaaatttgattttatggcttattaaatttagaaaaatattataattaaagcttgaaacaagtaaaacatgaaatttattaattattaattttataattacaaaatcatatgaaactataagaatttactcaaactataattaagatttcggaccgcatacaactacgcagtccattaaattataatataattgagacttcaggccaagcacaactcaatactactccagtactccctccgtttttaatagataacgttgttgtttttaaacacatgtttgattatttgtcttattaaaaaaattatacaaatgtataagatataaatcatacttaaaaaactttaagtgattaaacaattaacaacaaaataaattataattacataatttttttgaatatgatgaatggtcaaacgtataacaaaaagttaatgacgtcatctattaaaatacggaggtagtataaaataattttaaactttgaaattattaaatcatgaaaatactatgattgtatgatggagaggctaaaccatggtttataaaaaattcgatgattatcactcagttaccgcaaaaaccaccatctccagttagtccgattcgtatttagaaacggcttgatatatatacataggctaagattaaccgcttgatctagtctacggtggagaattgtatccatagttttgacagatatgcgactatgattttattttctcgaatcatgagaacttctagcttttctgattaatgtaaaattttctagcttgtcaggattaatatgaggacttgtagtaggagagactccaattagtacaaaagaaatatttgcttgaacatagtacttgcactaatataaattatttctatcttttgttttctaactaattcatgtttatcctgaaacgtacttacagtaacatttttatagttcttcacaactatttgcatattacgtttgaggagtaaaatagttctacgtaagcataagcctagctaacgtaaatatgatgcatatgctaaagcgacgggaagtggcgcatgtgcgtcgagcatacacatgtacacagctatgcttagactagtatgcactttcatggagctagatagcagctctgcctgccgaaagcttaggtcgatccgtaaaagggagtagacacatacatatttatcagtggctcacatgcatcgatcgatcgagaattcgagaccgtcaagagatcagagaggaatatggatccggctgtgcaggctcttcgtcaatcattggcaaactcgttcccatttttgatcaaaattcagaatgaatgcagcagatagatgatagatgggacgatggtcacagtctggccggtacgtcgtgatgcatcgaatcgattttggaagatgttatgtatctgtttggatggaaagatggttgttaggtttgcctgtttcaccgattggcagggattgtctagagcttgctggctggctgggaattcaagcacatatcacacgctatttgcaagctgcggccgcgtgcgatatatgctgctaccttgtgtatgggcagaagatacattattttgtaattttaccaaagttgcacctagctatggactgaacattcgtgcttagtatatttttttactcactctctcacaaaataaaccaacttttatatatacatgtatcaagatttacatacatcgagattcgggaatatgcttctttttatatactatatacaatgtttgtttattaattaggaagttgtgaagaagttaatgtttttcaacagttcttttcagctttaatttagggagtagtaacatagtaataagatggaaaagtaacaaataccgttaattatatttagtgcctccataaattattttttgtttcaactcttgtactccctccgtcttctaatataagggattttggtattttgcttgcactgtttaaccattaatcttatttaaaaaaatagaattattatttattttacttgtgacttactttattatctaaaatactttaagcacaacttttcgttttttatatttacataaatatttttaataagacgagtgatcaaacagtgcaaacaaatatcaaaacctattatattaagggacggagggagtacaagactccaaattatcaaaacccatgcttagtttggcagactcacatgcatgtttagttacaatgagacgtcgtgtacgtactgtttactttctgaaagactaaactgtatgcgatcgacaggcagttagccaatagctagctctacacacatccttatttctgaaaaatcttactatttacaatactctgttacacaagcataccctccaatcattttagacataagtcatattttagcttatatatgcgcgcgaaggactaattaagaaagcagacaaaataaataattttatgcacttcatttttaccatataacgaaaagatgtgtcactttaatcaaaagaataaaggtatttgtctatttatattgtagggacgatggaggggaaaaactaacttttcggaatgctaaaaagtaaaatggctcattatcacctaagcacatggtttccatattttataacgttcgctatatctgtttctgtaaaccagatttgcattcagtcaaattttcaccttccattttaatatataattgtagtaaagcgtataacctttagacacatatctagctctaatatatatgctgaaagaaaatgttgatcgttcgtacatatatccatgtgcctaaatgcctaaaggtcaatctatcatcgaatatgtgtgcatcgcaacaaaaccttgtttccgaaggaaatgaaaaaaaggcaaccggtgtatgataggcctgcatgtatatatatgtgcccatggaccctaacacctcttccaaccaagattccatccaacctactacttaacctacatgtgtcactctaggaagcccctgtctgctgcattttagggctttttgttcttgtggtaccatctgggccagctagctcgctcctttacaatgcacaaactagtattgtacatgtttcaaaatataagtatttttagattatttagcaaatactacgtacggtcaagaaaaaaatatattctctttcagtcgtcttagggattaaattttgaagtttgaatagcttagatttcccttccaagcacgcgattgactgaaaatatataggcttatgtatattgtaacccgtgcataaaacatgtatattatgacaaaaatttaaattttagaaatgcttatagtttggaaaggtaaagtggcagcagaaatgcaccaaattaaagatgtggacggcaggcgcggaaagatgtgtagtgcaaccgtgagtgactcatcgatcgcatggaatacaaatgatcgatcgatcgatggagatagatagaggcgatcatatcattggagaggctaactagagtagcaagcaaaaaggctgcaggctagatacgcgcatgcatgcagcgccactagctagtgcatatgatattatgggtgagctgagcccttggtaggcacatggtatcgatgccctcggccggcatggagagagacaagagctggactttctagtgaacaagccggtgcaacctcttcaaattagagatacatatatatatatatatatatatatatatatatatatatatgtatatgtatatatatatatatatatgtatatgtatatatatatgtatatgtatatgtatatataaggcatatgattgtgatcgatactgatctggaaaagaagttcatggatatataattcattgtgtacatatcttaaccattactaaaaattccgtcatttatatataggttcaaagaaaaaagtggcatcgtctatctctcagcaaatggttgattcacatttttgccattttattggactctttttcaataagatttagctctagctagatccatttggaacgggcaaaattgtcactattccttttcagtggttgaatgaggtttttaattaccataccaagtgtgggggtaaacaaaaccattaattacgtggaattcatataaaatttcaaagttccaaacaaatcgatgtgctttctcaataagtgtacacggatttaagctcaattttttttctggcatcatagacattgaatttgtatcaacataaggaccatttccttctctcttttttttggcactcccaaatcgacaccgacaccaacccttccatatcgatcagctaaaaaaaagttattcccgtgaaaagagtaggtctttcctatcgatcgatcaatagtcagagtcagtgaaaagaagtatattatgcatccacggacaaacaaggacaacggcgaagggggcctgagatcagggcaggggtggatttcggtgggaggttttgctcaacgattcacagtggaacgggtgacctcaacgattcttaatggaacaggtgcaggaaatgacaatttttttttcaaagaagacaatattattttaataaaaaaataaataaagtatgagctcgaaaaaaatttcatgccatccctaatctctttttggaggaaggcacccacccttcccctgccactccccctccccaacccaaaccattccatttctttctcctttcctttttcttctcttttatgtttgcttttatcaccatagctacagatatcatgcgaaatatccttgtggaggcctttcattgctccttctaccatcggatgtctggatcgacaacgttagttcatggatgacgctgtagcgactcgctagtgctagggcatgtggagttgtaggcggtgtggcaactcgatggggccatggcatcgacagtgtggtgaccttaacgatgcatattgccgtcgtctgcgacatgttcggctggctcacccccattgcattggtgtacgcaaggccacggcttcggcttcacaatgttttgtgacaatagtattgtgcaacacacattgtgtatgaggagcggtttgtgcaatggtgaaaacccagtcagattctaactgattttgatgatggcaatgctctcgggtgttgtttttctccttggaggcatcatcattacaccccatccctcagcactggtccacaggtgaaattaaaccatgctttgtttgtttagacgagcggcggtagaggctcacgtcatatccttcatggagatgtgatcactttgtaggatgtgtgcggcaattaatggctatttttggatcggctttgatgactgtcatggtggcaatatctagccgaacgactgatttactactcagttattctccgccgttatcttcgtttttaatcatgttgtgattttctaagtcgcagtctttgatataacctctatactaatagaacgtagtttctttaaaataaagaccataacaatttcattatctctactattataaaaattgaagatgtttccacgatccatcatccgtgtttgagtcggttatacaaattgaagatgtttccgcggttcgtcattcgtgtttgagtcggttatacaaattgaagatctgtttaaaaaaactcgcatgctaatttgagacgatcggactcctaactgcagctcatgattttctaaaaatatatatatccaagcgaactcccaaaataaatttaatcttaactaaaccatataataataataataaaattaaaatagacttcacctgttgcaacgcacgtatattttttctagttaaagaaaagaaaggcacccaaagtaagccgaagatgcacgcacatgacgaggggttgtgcaccacttcttgttaaaattccccgtgatcatcttctttcctagtgccaattcagcatggaataacgtacgatgacgacgcgcatcaaccggccggcacacctggttctattggcgaaaagcaatgtaggtatgcaatatatcgccgcgacacgacgagacgtaacgacgatctatctcatatagctatatattcgtgacatgcatgctatatattgtgtacgtcaagtacgtgtcgctgttctgggctagctagggatcgatcgagtacaatatatattagcttcctccaagaaataaattaagctcaatatatatacgtactaacgtacgttggttaccttaaaattaaactaacaaacatatattataaatatttggaaaagaaggtagtatatatataataatctagcttggacgtattgctaagtctataacggctaactacacatatccactagatggtaccacaaatgaataaacgcaacctagaaatggtaaaaagaacatctaattaaactgaaaattgagtttttacctcactatcgtttcacaaaaggaaaatgatacacgtaaaaaaaatttttacaaacacatgtgtgttaaaaaaattgatgtggtacattagttaaatcttgattgaattgtgattgaatcttggcttttcaagcccattaattaaatctaagtgttgagatattaattgttagtaagagcttagatagtttttttcccaaatacatactccctccatctacttttgatagtcatatttcatcttggcacatagaccaaggataagaaattctacttatcatccatttaaacatgctactagtcattcctcgtaaacaagcgattcattaatatttacatttctcgatacccatatagccaatcatgtgtggaagaatggagagtcacgcattaaattcgagaaagttattaagaggatagtttgttggattgaaatatggctatcaaaaataaatttttcagatttgaaaatataactataaaaaatagatggagggagtacttcgcaaaaaagaagtattttaaaatggatgaaggataaaattattgttgttgcagattatttacttgattatagataaattaaatattttaataaatagtttaaatggtctgtagaaatgtttaaaaaatatatatatttgatgcgtgaaataaataatccatttcaacgatccgtaaataattaataaaaaaagggagcctaattaatcacattcctagtagctagctagtacatctactgatgcatatttaatcaaggtaaaaagcatgcatggttaaaatacgaattccatttcacaggagagaatgtgccttaattgtcataaccaacacagcgtatttataattaattggtgcgtcaaacagtaatgacctgaattattgatatgacatacaacgcaacaactaactgagtggagcgattaatttacacgcagtgattgttactgaacgatctatatataatgtacatttatgcaaaggttgtggaacgattctgtattcactcagtagaaattactccatgtttatagaaaagaagtacaaataatggagaataagatcctggatcgcaaagaaaaaaaaaggggagggcatattatttttattttatccatagcacaaacaagactacaccctatagaggttactgtaagaagtggaagtaataagttcatattacgctttaatttacccacttatgagatcaattgattatatattgcagccattatttggagcactttattctaaagaacacccaactagttactgcaattatttgcacggtgctaaagtgtcccatcggtctatcgcaaaagttccggagagacgacacaggatgattagaaatcaatagcacacgtgtgacacctgattgccaagtgaacgatgacttggttaaaatacacaaaatcatattgaatggaattaagaaatatttggaaaatgaaaattaattgccgcacatggtaaaaatctgtaacttcgtatcaccaaagtatttaatttatgtttgactgttaataccccgacccgaaaaaaaataataataaacactgttacaaaaacgattttcctacggagagattgtggaaggatcataactagtcctttggaaaaatcatcctcccatatttgcgtgcggaaccttaacaggaccgcacgtgaaaatcgattttcgcaggcgggcctcttaagaatccgcacacaaaaataagcctatttttgcaagcaaacctcttaagagggcgcacgcggaaattgattttcacctgcgggcatcttaagagcactgcacacgaaaataccctccctcctttttccctattaacacttcaaaaattccatccttatatcttccctccaactctctcacctccttatcattatcctcattcttatcctcacctccaactctctctcctctcctctcacacactcacacggcggcaggcggaagcttggcagcgggcgacagcgggaggagcggggccccgaccgcccccgccgacgaggaggaggtggtcggagcggaggcagacggcggccgtccccgcgctctccctgcggcggcgtctctccaccgctcggatccggtggcggcgcccctctccggccctcccccgcatggatccagtggcggcgcccctctcccgccctcccctgtgcgacaacaacgacgacggcaacggcgagatgcgacagcaactagggtttcgattttttttcggatttttattttcgcgtgcgggcaacataagcacccgcacgcgaaaatccaattttcgtgtgcgggtgcatcacctgcacaaagaaacctgatttttgcagacacttccgggcaaatgtgcgccacctccgcacgtaaaaattatttttgcctgcacagaaaaactgttttcctagtagtgaaagtacagcatttttatacaaatggaaaggtaagaaccactttatagaatacaatctttgattttttttcttaagaaaatatgaagatcggacattggccactaatagattcacacgtgtgtatcatgagtcctaggggtgagtaaccgcatgcaagatgtgtacatacatgcatgcatgtgacaacataaccggcttatttcgatgacattaaaaatttgaagtgcaccaatatgcatgtcgcctggtattgatatattattgaaatgcgtaggttgatgctagaatctaataaagcgagagcgtttatattactgtgatagatcatgtgtataatcaatatatgtatgaataaaattggttagtgttagtgatctgaaaatacagttgtgaaagggtgtttgagaggcaactgttgggaaataatctctcagctaattaaggaaactagagagaatcacatagcccgttttcacccattggcccgcgtgattgatacgcgtaactcatgattaatttccttaaagcacgatgatcggaagcgcacaaaaatcccataagggcacgccccgactcccttaacgcaagtataataaaggaaaggaactaagaccgtaattagtgacgatcgatccacggctttcgcatagtatgtttatacttatttgagtcaagttagaagatacttgtactctaacaatggtttctttgtttttattcaatatttgcagatgttacttgaggtcaatggagcatagtcgatgacagggaatggagctagactcaaaggagaggacgttttgagggtcaaggatgttatgttttatataacatgtgtgcacgtgttatggaaaagagagtcaatatcatatgattcatattatgtaactaaatataaaaatttgggcacatctatctagtcccacataattccgtcaagatttagtttgtttgtagtcaaaacactcaaaatgtttatgatgcatcttatgctcaaatttatcatcaaaataatttaaagtgactttaggaatgtttaatcaatttaattaacatatgaactaaattattttctcaacttcctaaaacaatagttagatttaagttgtcaaatttatctttttgtaaaactccacgcctctaacttataaaactggttggagaagtgtgatggtaggggcaaatataattcacatgctcagttttcacacacacacacacacaaaaaaaaaactttccaagttttaataaaagtgcattgagtgctaaaatttacaacttttatagtaattattataattttaactaaatgtgctagatattaatatgaaattttaaaagtaaattttacaaaattgcatgtattttggtccaaattatcacaaaactacagatttaatatgattatcataaaactacagatttaacactaaatttattatttatcacagaactatacatttaaggggaaatattgcaaaactacagatttattaataaagttttttttacaaaactataggtctaatgtcattgtaatcacaaattcttggacatttataattcgaacatatcattagtgctaataatttaaaccctaaaatatatagttttgctataattttactattaaatatgtaattatgcaatacttagccttaaacatgcagtttagcaataaatttattgtaaaatctatagttccgtgatacattatcctaaatttgtagttttgtgttcatttaaccagaatatctgtagttttatgaaatttactcaaatttaaatgctcttgcgttatatatttgcagattgttagacctatggttttatcatagtttacctactccaacgatatctcataatactatactgagcaacttcacatactaaagaaatggaaaatgctaagtaacttaaattaacatttactgtatatgctagactaccacaatgttattcacaaactgaagaaaatgatgaaggtgataaaatatctaaaagaaagccaatcattgaatactttaaatttgttatatttgaaagaaacaagaaatgtggagaagagaatatattcttacaacccaatccaatacatatcatcttttattattgattatgagcagctttctcttttgcctaatattatccatcattatccaagtgttagatagcatatatggaaggtcatcatcaacatgctaaatattcttgtgacgtgtgcatggaaaacatttttattttaaaagtctgtaaaacacatttaggtttaggtatacttataaaatgatattgcgctatctgacataggagaaaagtaacgttccctatatacgagaatatatgccatttaattaatcaaaaggattgttgattagaaaaagtgcttcaagttttttttttagtggaagactttcagttgtaactaaattgtatgtaacttcatacataggttatggaggttataatgtagtaattacatgataattatactataggtaccgtgcaattatattatagacgttataattgtatcttagttgtactacaaagttatatttgaaatttctttttaagaaaatgtgattatttttaaacaacttccttattcaaatgtaaaacatcggatatatgtctatattattaattgcgtgtggggtaattcgatattttggaccaattttaccaaaaagaaacaagattttgaaataatttctcatgttttatttttaaatataataaatatctaaactaaataaaacaaaccggaaaacacagtctaaagtaaacagagtacattaaacaaatcacatcatcaggcatatatatagatccaatgcaatatgccactctcttaaaattttattttgtggccgtgaagttttgagaaaaaaaattcttcggatataatggtatttattatttacaccaaaagggtataatttaaaaaataaagtaaagtgtataggcggtccttaaacctgtaaggtcatgtcatctagatcctcaaaatctcaaaatgtaaatctatgttatagaacttgtcaaagtgtatcatctagattccaaatcgacacagtctctctaggatcctacgtggcgacgtggcgttgatgtggcatgccacatggatgtgatgtgtccttttcttttttttttcttttctttttctttttcgctttctcctcattcttcttattttttcctttcttctgctcgggtcacaaagaaaggagacgaaaggaaaaaaaaacagaagaaggagaagaaaagaagaaaaaaaagagaaaggaaatttttttaaatgggtcctatttgttttttttacttaaaatggtcctatttgttagtcaaaatgacgctacatcatgtccgtgtggcatgctacatcagcgccacgtaggatcctgaagaggctgtggtgatttgggatctagatgacacactatgacaagttttgagacttggatatgcattttaagagtctagggacttggataacacaccattacatgtttaaggaccattcgtgcactttactctaaaaaatatactcttaacggtataaatactattaagttcaatagtataagctgttttggaaaaaatatattatgtatacgcatcactttaataatattatagatcatttaaaaagggatatttttaattcttaaacacatggtccatcatctaaattaatcttagcggaggctcccgagtcctccaaattaatcttagctagctgtcttatgtataagataataatgtgcgcacaatcacctctatgaatgcacacactcatgccctactcctataaggacctcaatgcacacactcatgccctactcctataaggacctcagaaatattaggctgttatattttgaaattgataaaatcactatagtcgaccgatatgttgtctatcactaaatgcaataactcatgttaaatctaggatttgaacttgggtaggttggttgcaccacaaggaacctaaccagttgagctacgctcacttcgcgatatttgaccttttcaattattattaatatatggttctccaactcttaactattcatcactatcacacaacaacacatcaatgacttctttgacagtttgtaaataacttttccttcgtttaatatatataccgtggaggtctcctccactgtggtttcatcagaaaaaacaacacatcaatgacccctcatcaatgtcaaattgataaaacctagcactgatgatggtttttagccccaaaaaataagtttgtgctatacacatgcttcacccggcattgatgaggagacatcagcgtcgggtcttatatcatccgacactgattatttggcgagacatcagtgttgggtcttgccactaaccgacactaatgagtaacacgttattaatttggagcgagatgactagacacttggccgaaaaagacatcagttccgggtattctgaagacccggcactgatgaccccaaccatattagtgctaatttcagatatatgaacttaaccttttcatataaacttggattgcaacaaagtttatatgaaaattgtaactctcgacaagttctatgattctgtagttgactttttcatatgagttattttatatactcaaattcaagatttaaatcttggttaggaattttcaaaaggaaacatgttcatttgttaacaagattgatgtgcaggtgagttggtaatgataggtgcatgtgaggtagaggtatcgtgtttgtatccttgcaatgacaagaattacatacaacatgaggaaggatggtaggagtattcaaaaatatttcttttatttttttagcttaaattttgaatttggatccggattatcagtatccagtttagcacctggcacagacgaactcatatcagtgtcgaacctacacaatactcggcacagatgagcccatatctatactttggatccgtattatcagtgtccggtttagcccacacctgacacaaatgaacccatatcagtgtcgggcctacacaatacctagcacagatgagcccatatctgtatcgggtttagagaatacttgacacagatgagtctatctagattctgcctatgtgcttatggcacatatgaacccatatcagtatcgggtttacacaatacctggtacaggtgagcctgtatctgtgctgggtttagagaatacctggcactgatgagtctatctagattctggcaatgtgcttctaggcacatctgtgacccgacactgggaagaaggggtcatcaatgttgaaagttgtgtctggtctattttcactttttcagtattgatgctagttacaaacgggcactgatgttattttctatagtagtgcatcttgtttggcataagttaaggcaaagaaatgcgaaacataatctcctatgagtcgatcggtgctctgtattcacatgatcctaatggcctaactggagcacctatacacgttaaaaacatgcacacacccaagcataagaacaccatgatttaagctattattccctctatctcataatataaggcatgcacaatttaagattcaactttaaaaacatttaaccaacaattattataatataaattaaattttatttattaaaattaatatcattggattgacatttaaatttactttaagatgattataattttgttgcaataaccttataatatatgagaaattttaagtcaaacattaattttgaagactgtgccaagtttaatcatgccttatattatagagtaaaaggagtattgaataagaagattaattatttactactacctccgtccaataatgcaagagatttttcccatatagctatatgggtagattcccgattgaggtggtatatatttcactcgtgattcaattaataaacatctaagcactgttaaattgtgcttttctccttagctactttcttgcctatattgagcacgttttccaatacataaaacggtattttttttaaaaaacatttataaatatagacgttttttaaaaaatcaagtaaattaattttttaatagctaataattaataatgcctaatcatctggctgtttttacctttttggtgtcaccgagtagctcagccaagcagcacattcaaatgctgatgtcacaaaacgtgtgcgctcttatattaattatcttactgactactaattaacaagcgatcgatgctaacactaaaccaacccttgcaaaataataatttccccccttatgaactagtatagtttttgtcaactccaaatccactctaaagaacctgatgttgatttgaattcctacttatattaagaaagcactgagagccctcgtgtaatataagtgcgaacccactgagatttaattagaatttggaggaatgcaaagatcgatcgagtcgtacgtgacgaggcatgggccctcctctaatcatgaccgggcctcattaaccatatcctgtttcatctaattaagcaaggtattattagctagatgtggtttagcttttacaccaagatgttaaataaattaactaattaattggcagtgagatctttctggggcccatgtacacgtgtgttttcccctctttttggtcacacatgcgtgacatgcacttaattacactcttaactaattgttgggaggcaaagcatgcgtttgtcacccaactcatgtcatacatgcacatactactaatctctctgtctgtgaaatgtcacctgcttatccactagattatcactttttcccaaataatatttgtgttacaaattaatatttaatcacctgctactatgcggcacatttcatacctgtcgctttatttacgttctggtcgatcgagtagtgagcgcacgcgctctctgtagattttgtagtcaatctaaaaaagattaaaaaaacaaaatttaggtcaattatgatagctaattacagcccccttgacctgcaatggctccgtactactcccctttccaaaggtttaaaacatactccgtactgtatttcttttgggagcaggaccaaaaatactcatataccatataataaaataataataataataaaactatacgtatgcatgtaatcaataagtattaaaatgatcttttggattttgatcaataatttagtttagtatagagaccacgggtgtgttcggtactgccggtttccaactttcccgtctcgtttttcacgcgcacgtttttcaaactactaaactaaacagtacgttttttttaaaaaaatttctatatgaaagttgcttaaaaatcatattgatcctttttgaaaaaaaattagctaatacttaattaatcatgcgctaatggatcgttccgttttccgcgtgcatacttcccggttgggaacctccagtagggaacacaccctacaaatatatcagatgtgtactctagcagttaatcatatggtttgtaaaccataaaataattacactatccaattgtcatcgccctctaaaaacacaagcctaaccataccctatgaagaacccaatagggaaagtttttgaggctgtttgcttctgcttgttaccgcaccattgaaaatggctctaagctgccacagctatcactaccgatcaacacctttatttaatattcctacattatctgcaaatataatgagttctaggtacataaatatggtccatcaagagtgccagatacgacaagagaccccctgatcagctatcagggcacattaagtccacttaagaaaaaagtagcagcaactaaacctacctactcatccccagataagttcgttttcacccatcctactgaaaagatgtttccatgagtacttactacatcgttcgtatttaagtcggtttttaaattcattcgcttttggaaatacataaaaagtcttataagaagcgcttttagaaactcacatgctaacttaggacgagagtcggactcctaattgcttcagaattatcaccaggccacaggaaagcaatgtacaagatgtgaccatcataccaataagaattctgaattagatatcaatattatcaaataaaaattccatacaactttttagaaaaaaaataacaataatacgattaaaatagctttcccctattgcaacgcatgagcatttcttcaagtaccaatataaaacttaaaatattataataccaacacttcataataatcaaatcccaatgcaaaatattagcctctttatgtactttcaacacatttatattcttcttttcataaaatcttatgcaatgattacacaaaattaatttattttgggacaaatgagagatgcttaaaatgaacttattatgagatggagagagtaccattgaaacaacctatctacagtatatacttagtgcagccccaatgcatcactcattttattttctattgtatatgattttaagacataataatgtaataattatagcttttgatggtggtaccccacctgcagtgagtgtaagtttgacaaggcctcgtgtaagcacacacattagcaggccgatttgtgggccctccggttggtgggcaaccaagcaggccaccatgttcacaaaaggctgggccttcctcaagtgcgagccactgtatatgggccacacgcccacacgtctacgtctgttaattatacggctcacctctgccccctaaaaaaagaataacatttttatatacaagattaaaagaaggccaatatgacaattattcggaaaaaaatatcttaccaaaaaaatgaaattaattaataaaaaatgagtttggaaatactttagaacatgcaattatttggagcttcatatacgtggaatcaatgaacggtaagaaaatctgcaaccttatcagatacatgggaatggacagatctaaaaaaacaaaaagatttgcattttctacaaataatgacttacttgtcctttaggaaaaggattggatttaaacaaattttgagtaaaacagtgatgagaaaaattaagtaaaaattggactatctttctacgtatctaagtgcttgatcataaatatgtttaagaaatccattcagacttccattaaaaatccaaaatgaattggcagtttggagtaatttgtagtaagttctgaattccacctataataagtaatttaattaaattaatattcgtatatcatgatttacagttgttattttcagtcttaagcctacacacttttttccccctcagattaggtgagataacacttacaccttgttttctgtataagatttttcatttagatggaaaacataataggtattatatacaaattcttaaaaatcacagatacagggaagaagcttgtttttccccctcggagtaggtgagataacacttataccttgttttccgtataagattttttacatagatggaaaaacataaaaactattatatacaaattcttaaaaatcatagatatagggaagctgatattaaacaaccgtataaattttcagatcaaattcaactttatttgtgagatatgaaattaacaaatggcaaataaaacactattccttttttgtctttttctttgctgattataatcttttatatttaatgatttttatcatgaaactttgtatggttatgatccttttagctttttctgagattattatcattatttttagaacttttatgctatggtttacacctagaatgagaaatgggactgccctattttgaagcccataaccctaacccttcacttttagtcccctccacaaagcttgataatgcatgcagccaaattagtggagtggaaaagcttccattagtgttgacttgacatgacagtacaggatccttcatggtacccacagaggcacaaacaaagcatgacaagctgattgcaaaccatcatagggccacaatagcttagctttctctgaagaaagacacacccacatgccacatgaagcatcttcttttttctcagtgtgcagagtttccaaaagctaaacatataatttcaaatatgacatcatgatcacttgttcagagttgacagggatgacacataaaaaaaaccttggcagcatgaagtgagattatggcaatgaaacagtacagttaatatataaactgtgagagatagtgccaaccagaaattaagtacatgtaaaattaattaagaaccatcaactgaaaaatgatcccactttgcaagatagtgggctctgagtacatgacactgaaaaactactactaaaaagaagttatcgattctatacataaaagacaattgtgtcccctatttagagttatttttttgtttgatgtttttacatgagtaaggtacctttatttttaagatagactaaggtactttactgatttactctaaagatgaatataatttttgcagctgtgcagaaactccataaatgagggtctgatcagttcccttctagaacagcttgcaaggagtcctaattaaaatttgacacatcttttcctgctttggagaaactgagctgaaatgaggtgacctcacttgagtcaaagatctgaacagttattccaagttgctgtgggggacttagcacgagtttgctgtatcacactttttaccacattccatgcagagacagtgcaagagtccatcttgttctgctactatcagccaagccaaagctgtgctaaaggctcactttccagagtggttttcctagtgatgaggaaacagtgacccatccaatccttcacatcaattatggagcagattcgagctcccaggaaaacgaggtatgaagaatgtgactctttgttagtgcctgcctaattgccgattaaccataaagaacttatttttccgtggtttttagttaccgattaagttaaagttcacttctgaattctacgaactcatctggtcaaaatgagagaaccgaatatactaaacacctattagtaaaactgattgaagattctcttgaaaaaaagattacatcatgacttgttttggtaagagatattttctggcgaaagaattcatcatcagtccaatgcaaagtcaaagatatatcaccatatcaacaggtaatgtaactatcacctttttttttttcgcgtaaacaagatagcttaggtccagaaacaaccaatatgcaaatacacacggacgcaaatccaacagatgccattgaggtagaacgacgccgaaaagatggatcaagacgtctcattacgctttgcacggtcaaacgctagcttatccaagatttgacacagtgttagccgcacagagatacagtggagagcatattgcgtatttatcttggcattttgctaacttgaacagaatccaagagaagatttgttcctcaagtcgcatgagctaggtttgcctccctctaggatatttcagaattgaatgcttcagttttctctgaattctttcactgcaatgtaaatatgttgcaattgcacctgacagccatagcagtgatggtagttttgtggtcttaatttaaatttgcaaaccttttacaatctctcagagttgacaagtaccgcactgcctacggttgggaaaatttaaaaaaccattaatttgtccattgccatggagccctgtactttgtccaatgaaacttgttcctgaaaaagattataaacagaaactgttaggtatgtcggatgcacgacgaccctactattaattactagtaattcacatgcatgtctcctagtaattaaaacctgcatttcttttgcgtttttcagagacgtccatgtccatggccactcggagcaccacaccaccctgttggccgaagccgacgtgatcatgccgcggcacggcaatggcagaatctcaactcagccatagctttctttttatttccttttaattggagtgcagcgaatcatcaatcatgtcaagcacccaaggaggaagacgaagacgaggacgaagtagcaggacggacaaatcgctgagacatcacggcctgaataaagccagtcgccatacatatctgcgttttcttctgaaacttaattgcaggcccacacggttgtgatctgatctgaccgaactaaacgtgacaaattatgtgcagtagtagcagcttatcaatttgacaattggtggtgtactctctgcaagaagaaaacaaaaaatggtgatgcacaattgcacatcagtgatcagtactagatgtatgtgcatcatttgggtttgtgtgtacaacttggttgcttggacgtgttgggatttgtatgacattgaccatttgaccacctctctttcttcagagagaaggatgagatttctatcaaggatcattgagaaagacatagcacctaagctaagctagtgtacatgagagatctttagtttgggtgttttggacacatgcaaatatctctcctttcccttgaaaatcttgtagagtttttggatatggatatccatattctgatgaagccagagggtcagttgcactgaacatgcaggggatcaaggcagaattgtgcaaagtcagaagtagggttgccttctcaagatatactagaaaggatcaaaggagtaaggttggctatagctagtagaagctgattttccaaggtgcagaaagtgcagagatgatggtgatatggaatcaatataactgtaggagaggaagctctgaggatggagtatacacatgtatgaagatatgcttgtactggttggtgagaacaaagagttgtcctttttggagtttggtgagggccataatgactcaagtcaactctcaagaaaaataatattttttattctgtccaatacttggattattgtctcaacacagaagtgcatagaacaaatcttaaaaataagaaagaagtgcattgcagcatttttcttttcatttataggctatgtttagttcaacgtaaagtttggattttggttgaaattagagatgatgtgactgaaaaattgtgtgtgcatgacatgttgatgtgatggaaaagaactgaagtttggatccaaactttggatctaaacacagccatacttgctcaccttggttagagtaacagcaacaaattggtaatccagaatgcatgacaggagaaatcccagatggtattcttgttttgtcggtagttcataggagataatttaaatgataacatatcatatgcacacaagtcttctcgtataaatacacgcacaccaactaaaaatttcaccaattttttttaaaaaaactgtacatgtacttttactagtattacagtctaatcttcaaaatcattatatatacagagcaacaaaaaagacaagattctgatagatttatactcttaaaactgtcataatttttatctttttttggttacggttaaaatataatgaatctgaggttaagactttatgcagtaatattggaaatacttgtacaattttttctaaatttttttagtgaaattgttagtggtatgcacggtgttacatgagaagtcttgtgtgcacgtgatatattctcaatttaagtactctatcagcatctgattcaatctagaaaaaaattaatggataattcaggattaaaatggcatgcagccgtatcttagaagaaggatcacaatccctgccatgtgttaaaataaatgaatgctccaacctgacatttttctgaccaaagaaacgggaaattacatcaaggaaccctagaaacaaatgagcttcccactagcaatagtcagctcatgctagtgttggataaataacagactgaactcagaagaaatgcatgtcatagtaaggaaaaaagtaaaaataacagcaaaaattaaagcctaatgcttctttaatttttttcccatataaaaaaaaatatgtggccatagaatttgatacttttcatattgaccaaacaaactaatgagtaagcaatcctttgctgagtaggatccgatgcaaaagatgatacttgccttaatctggtttgttaggccgaagagagagcactttttgtcacaatcagcattaacagcaacacaatagcaactcataaggactaatggccactccacaacaatattggaaaccgctattacaagcaggtcgtaaagcttaatcatttcaggttcaaatgacctacccaggcagacttgtccagctgattgggccaagcatataaacacatccacatcacaaaattcgaaaatgcgtatataccgtgttgtgccgaatcatgggagctacagagcaagaagtgtccaaaaatttatgctcagagtcaactccctgtgtgtgaccacaaaagcaacaaacaatacgatgtatagggtttacaagagaaaatggacagtaaatgttctaaaaggataaatggataatgataaattgattactcactcgggagctggggaggaatcaacctgggctatgtatggtccaggtctgtcccagcttgctttagccctcaaaaagttcagcatggtgaaagtccctgagccatagtccaggtggcctgtaacatttcatacaaactattcaaatgtaaaaaagaaaaaaaatacagtgagcaaagtattctgtaacttctgtattatcttccatcatggccttttagtttcagttgaagatatgcacattttcatatgcaaagataataatgcagactatgtgcaatcattttcccctcctcttattttattttattttagaaaaaatggtttccctcttgtgagcatctggagaaacaccagtataggtgacaagtgatcacctataaaaaaagatacagtgaacaaagtattctgtaacttctgtatcatcttccatcatggccttttagtttcagttgaagacatgcatattttcatatgcaaagataataatgcagactatgtgcaatcattttcccctcctctttgttttttttttacaaaaaaatggttttcctcttgtgagcatctggagaaacaccagtataggtgacaagtgatcacctataaaaaagatgggagcaggctcagcttgagtattctgttgattcatttctatcatttgatgccaaaaaacttctacatcaaaaagaaacaaacaaattactgtcatggcttgaggtagcagttagaacagtgcagatgatgtacaggaacttcaagagttaaaaatgacaacatattttgattgaagaacactccagggtgatatgatcagaacatctgacttgtcagaatataaaatatgaacatctcaagtctttaatgccaataagttgtccataaattcacagagcacgtaacaagaagaaaagatatacaaaaacatatattcttcaacgctgctttagtacattcaaagaccttcagctgagagaatgaatttgatctagtccacaggctggcatcgaccagtggagatcatacttcctccgtccaattctatcaggtttattttgatctatcatagtcaacaaaattagactttggccattaatttttcttgcaacatataattgtcaatggctacaaaatctattgttttggaagaactttgaaacataaatatatcgatacacatttttttgacagtaaacatgcatataatttgacaaattattggttaatcttaaggattgaatttttcaaatacatgtatgccttaaataattggatagatggagtgacttttaacttgaacattcagaacttcggactgcacattcagaacgcatgaatccaacaatggcatgtatgaaacataacctgattatattttgctaagatcggcatctaaacactttaaacatttcctaatgagaaaatgaaatttcccatttattaaaaataatagttcacatcagataaacactttagtgcctcatagaaagaaaataacggagattcttccaagcagtcatttccctttttcttttcgcaaccaacaggcagttctgctctgcaaaatgatccttgctcagcattgaagatgaactattatgttcactcgctttcaccttcgtatgcagatgcgcgtgcaaatgccagttcctgtcacatgtggacatacttcgattaaactggacactgctggaggagacaacattcagatgaatttgagatggcacacagaaaatagtgatgttgcatcaggtacgcatgaaaatgtccatggtgcagaaagtgcaaaacagatacatgtaaagcaaacaagaaaataacagcaacggaaggggaagaaaagaaatggaggcataaaaataacatgcagagcatgatcaactgttcttttcagtgcccacttctccattgtcattttggaaaatagacctagtcgcaatattaacacattcctaccaatgccctgtgagatggcaatattacaaaagttaggcagtgagtagccaatgctgataagaaggcatagctgcaatatcatcctcatggaaagctctgcaagcaagcataatagtattgaaaagaatgtggttcacatggtataactgcaaccaccgtggatcagtataatggagccagagaaaagctcatttgaaactcacaagctctccctatttttcatcatacagtaaaacactctaaaatacagccgttgctgttcaaagaaagagcaataccaatacttgaaacaacaataccactaccggcagcttacctagtaaaaaatgctaacaaaaaagagtaattcaaaccacctaagagataaacctgctaaatcgttcattggcgttcattatagtcccaaagaaccaaaatataaacacctttagtacatttttttgaatttctgatgctgctctgtttgaggaagtctttcagagaaacaagaaacatagtctgaacaacttgaatcaggatgataatacagtctaagattcaccaaatctgtaaatagtcagagtaaatgttgcattggacccattattttcatcagaagatttattgcacatcccaaatacaaataatacatgtgaacaaagataatcacattctcttctgacagcgccaaacattatcctacacagccacatccagtgtttgaaatgctcccactcacaagactgtcctctaggggtacatacaaaataactgaaaaccaaaccggggtactctatttttttctgtttaatttatgtgtgcggttcagtttccacgactaacccaacgtcattgtgcaatgactaaaacacaagtatgttaattaataagtaacaaccacactagacttagactaaaaggaatcaatatgcacaaatcgtggatgaaatatatgggataaaagaaaaccacaaatgaaacttatgcagtagcaggcactaaaagtccaatgtactcccaaatattaatatgggagaatcaattacagtaacgaatcataaaaaaatgtcttggagcaaaaaggcaagcaacgtaccagtgaggtgctgattatgattacagcacaattgcattctctgagattttcatggtttgaaaacgttccaaaattggtccattatcaagttctttaaatatctctctctcaatataacacaccataaagtcattgaggatttcatcaggtataagctcacaaaaatcggtatggatagcattcacttctgaaaatattttttcaactgatgcttttgtaactggtaagagcagtgccaacttgatgaggcgatataccaatgcaaatttgaaatgtgtttcagtttcaaccatcttagcagctagacttgcaatgtcataacaggcagtaaattcattacttcttctcataaaaagaatgtagttttggagttcatgttttatagctacacgatcatctatggagaaatcttcagcataaatcccagcaagccaagcaagcttttccacatcaaacttagagaagttgttccttggatcaagataagaaaaatgaactagtaactccatagaaacatcattaaaacgatgagttatctctgtcataatggagtcgatagcagcaaagaaaatatcatcacgataatgataatatcaagtaagagttaccccatcacgccttgaatgacctgtagctcgtatatgctcatccatatttggcaccggaatccaatttgtggcacaaaagctcttgacatcctcaaacaatgattcccagccattattcctcaaggtttgcaaacattctttcacatctgtaagttgtcccacagcctgaataatgccttcatccttcctttgcaacacaagtgataactcatttgtaatggtaaacaactttaacatcatcttcaaaatgaatacaaattcaaagctctccattgtttgtatcaaacctcctgcgcgagacggttgacgcccatgttgatgcacaatcattagtacatccaacactgagtcccacatcatgttaatacggcccaaggttgtataatatgatccccatcttgtacctcccaagctagccaggttcttttctttatgattgcttccttcagagagtatctcaccactctccaacttattcaaagtggtttggtgatgcttttcagttgatttatccatcatctgacaggattcaatcgtagtggtgatgatcaaagagatactgacgaagaaatcatgaattagtgacgaagagcaccttgagacagtaataagcacagattccaactggtgggcaaagcagtggacatagaaagcatacggattttcattatgtatcagtagctgcatgtcgttaaattcacatctcatgtttgaagctccatcatacccctgtcctcgtagtttagaaatagataagccatgctgagcaagcagaccaaccaatgtttccttgaatgcagcaggtgtatcctctgtgagatattcaagaccaagaaatctttctataaccttccctttcttattcacaaacctgcaaaccacaaattagaatatgttaaggtggctcaacaatgaaatggtagttgctttcaagtagagaacatataaacaacttaccttacaaaaactgccatttgatatttctctgccatatcgtgagaatcatcaataagtatggtgaaattaccatctccaatctctccaattatcacttctgtgacctcttgtgcacaagcttttgcaagacccttttgaatcaatggagaagttatgtcaatatttccaacgacgttcatatcaaaagccctttcaacctctttatccctcttcttgtacaaatctattaactctagaagattgcccttgtttatggaggttggtgattgaccaggaccactgaaggccatgccttgcattaggagaaatcttgcacaatctaaagaagcaatgaaacaaattctatatgcacttccaatgtctggatggttagaagagagctcatgagacttgctttgatagccaaaatcctcaagacctttccttcccttactgtgatcactggtacctccaccaaccttgtctttggtttccccatgatacccatcaattgatctgtgtcgattcaaatcagaagttgtggcatctggattaaacttcttggtaacattagcccttttcttcagccctgtaggtgtgcccgcaccacattcaagagtcctctttggcacaggctgataatacctcctcattacttaaaggttaaaactaacctgagaaacatatacattatcaaaaattaatatatcaaacacagtaacacagatccacctaagatttacccccacaacaatatcataatttcgcacataacatgctcaaatgttaattcagaattgccacaactcacaggtcctccaatgcttacaatccagaagtgacaactaacgagatttgaacaggagtataatacctcctcatttcttaaaagttaaaccctgagaaacatgttacattatcaacaattaataaataaaaaaattccacctaagattaagccacaataataccataatctctctcataacaagttcaaatgctaatccataattcctagttgctacaatgctacaacaaacaggtccccgaatgcttacaatctgaaaactacaattcacgagagctgaatgggagtacaagtagaggactcagtaccaaaatccctcgccccactccgccggcgcaccggcactcgctgctgcccctccagctccagcctccgcaacccaccgacgtcccgacgcctccgccggggaatcgagcctccgggagacttctcagggcggaggcggagcagtcgccccacgccgccgcttcccctcccccaaaatgcgtaatcaccgaattgccactgccggctagggttttcccgccgaaatggagaaaaccccattgccgaatggaccacgcggccttttaactcctcgaaggccttcttgggccgctttccgggccgcgggcctccaccacccgtattcccgtggggtctagatccatcccggcattccgaacaacggttgcgaatcctttccgggcggaaagaaaaacagagcttgtcagacagatccgacccgaacaccatccgcttcgccgccgcatcaattcggcgagaggcgcattcgaatctggaaagcaccaaaccctagcttcaccaccaccacgaccaccaccatctcccatggcgccgacggcggcggcggcggggcccagcgacgacgggctccggaagctggagtacctctcgctggtctccaaggtgtgctcggagctggagacccacattggcgtcggcgacaaggtgctcgccgagttcatcaccgagctcggccgcgactccgcctccgtcgccgacttcgacaccaagctcaaggccaacggcgccgacctcccggactacttcgtccgcaccctcctcaccatcatccacgccatcctcccgccgccctccgactcccgcaaccctagctccgcgtcgcagcccgccgcggggggctccaagttccccggcctctcccgccccgacgaccccgaccgcgcccgcaacctccgcctcgagctcgagcgggacgccgaagaggccgccgcgacggcagcccccgcccccgccagggacgaccgcggccgccgccgtgatgagcgaggacgggaccggggtcgagatgaccgcggccgcgacgacggtgggcgtgaccgcgactatgaacgcggcggccgtgaccatgaccgcagccatggccgggatcgtgaccatggccgtgacagagaccgagatcgagcctgtgatggggatcgacaacgtggccgtgactatggccgtgatagagaccaagacagagatcacgacagggatcgtgaaggtgaacggcggagggaccgagataaggataggggtagagacattgacagagatatggacagggaccataggcgaggcaggaggtatgatgatgaggaagaaccagaacagtttggtggaaggaaagaaggcgctcttgtgaattccagtggcgagccagagttgtaccaggtgtaccggggtagggtgacacgggtaatggacaccggttgctttgtcaggcttgaggatgttcgtggaggacgtgagggtcttgttcacatctcacaaatggcaaccaggcgagtggccaatgcgaaagagatggtgaagcgtgatcaggaggtgtatgttaaggtggtttccgtgaagggccagaaattgagtttatcaatgagggacgtagatcaggatacagggagagatctcctgccaatacaacgtggtggggatgatgcaccaagggcgaacccatctggtggtagtgctagtggtgttggtgtgggctctggcaagaggctgggtctctctgggattatgattgcagaggaggatgaggttgcacctccttcacgtcggccacttaagcggatgagctctccagagaggtgggaggcgaagcagctgattgcttcaggtgttctggatgtgagggattacccaatgtttgatgaggatggggatggtatgttgtaccaggaggaaggggcagaagaggagcaggagattgagcttaatgaagatgaacctgctttcttgcagggacagagtagattttcgattgacatgtcacctgttaagattttcaagaatccagagggctcattgagccgagcagctgctctccaaactgctctcataaaggagcggcgtgaggttcgggaacaggaacagagagcaatgttggattcaatccccaaggatctgaatcggccatgggaggaccctatgcctgatactggggaacggcaccttgcgcaggagctgaggggtgttggactttcagcttatgacatgcctgaatggaagaaagaagcctatggaaaggctctgacatttgggcaaaggtctaagctttcaatacaagaccagaggcaaagtcttccaatatacaagttgaagaaagagctgatacaagctgtgcatgataaccaagtcttggttgttattggagagactggttctggtaaaacaacacaggtgacacaatatttggccgaagcaggctacacgaccagaggtaagattggttgcactcaacctcgtcgtgtggctgcaatgtctgttgctaagagagtagcagaagaatttggttgtcgacttggagaggaagttggttatgccatccgctttgaggattgcactgggcctgacacggtaatcaaatacatgactgatggcatgcttttgcgtgagattcttgtcgatgagaacctttcccagtattctgtaattatgcttgatgaagcgcatgaaaggaccatacacacagatgttctctttggcttgctgaaacagcttattaagcgcagatctgacatgaggcttattgttacttctgctaccctggacgcagagaagttctcagggtattttttcaattgcaacatcttcacaattcctggaaggacgttcccggtagagatactctacaccaaacaaccagaaagtgactatttggatgcagcattgatcaccgtgcttcaaatacacttgactgagccagaaggtgatatcctcctttttttgactggtcaagaggagattgatcatgcttgtcaatgtctttatgagaggatgaaagggctagggaaggatgttcctgagctcataatattgcctgtttatagtgctcttccgagtgaaatgcagtcgaagatctttgacccagctcctccagggaagaggaaggttgttgtggccaccaatatcgctgaagcttctctaaccattgacggcatatattatgtcgtcgatcctggttttgccaaaattaatgtttataattcaaaacaaggactcgattcattggtcatcactccaatctctcaagcatcagcgaagcagagggcagggcgtgctgggcgtactggccctggcaaatgctatcgtctatacactgaaagtgcataccgcaatgaaatgtctcccacaacaatcccagaaattcaaaggattaacttggggtctacagttctcaacatgaaggcgatgggaatcaatgacctattatcctttgatttcatggaccctcctgcacctcaagcacttatatctgcaatggagcaattgtacagcctaggtgctcttgatgaagaagggctccttaccaaactggggaggaaaatggctgaatttccactggatccaccactttcgaagatgcttctagccagcgttgaccttggatgcagtgatgagatactaactattatagctatgatacaaactgggaacattttctataggccaagagaaaaacaggctcaggctgatcaaaagagggccaagtttttccagccagagggggatcatctaactctgcttgctgtatatgaggcgtggaaggcaaaaaacttttcagggccctggtgttttgagaactttgttcaatcaagatccttaaggagagctcaagatgtgaggaagcagcttctcactatcatggacaggtaactatttaattttcagtggtttgaactaaaatcctctgtgaagatatatattctttgacttgtattcttgttagtttgccatgtacataggtcaatttcttccaagcttggtttgccttcagattactctgagttccttgctctccccatttgatttagattattgagcggattaaatcgaatattttgggaaataaacttagcaaatagcttaaaacaagtggtcaatgcagtacaagaaagtttttgaggcaatgtattttcttttgaagcatagagcaaataatccgtttcaataatccaacgtattatctgaaaaagaacattttatattattgtcatcaattgcctggtttattacgttagcattcttcatgtcttaacacagttgagcttttctgatttttagttaaaagaaaagcatagtagtcaaaaaaagaacatgctgcaattacttcaaaaaagggagtagggaggtgatgataacttgacctacccaaggcccaagtttagatattttttactacaatttatgtagctgggtgtttgttatttgtaaaataatagaaaaatagtaatctttgcatatgagtatatgtaggtggtcagttcttctataataatgtatacaagttctagatttgaggataacttgttgcatttatattttattttagacttgtagtttatttagttggggctcattgcaaattgaaacacctagtgcatatgcaattatgcagtgcattgtgacaagatgtatactaaagacataaccataaaaaaagcaaagtatgcatggtaatttgtattacactttatttcaacaatatgggagttagatctgaaactgggttgcataattaacagtttgccccgcagtatttacttgataccatgttattattcatcagggttttgcatagtttacagtttgcccccacagtatttacttgattgtgtgtaattcatcaaatggggttgatatattagtttctgtggatggactatactattcgatccctttgttgttgttttagaaataaaaatctcaagagaaattattagagaattgcttcatttgttacctgctctgtgatcgaggtcttttgaccattctagttttaatagcatattccacctttttagatgagctgttatgtcttatgagtttttcttttaaacgagggcatcttatgagttccatcgttatactaacaaattccgtgatttttgcagatataaattggatgttgtctcagctgggaggaacttcacaaaaataaggaaagcaatcactgccggcttctttttccacgctgccaggaaggatccccaggagggatacagaaccttggtagagaaccagccggtgtacatacacccgagcagcgcattgttccagcggcagccagactgggtcatctaccacgaacttgtaatgacgacgaaggagtacatgcgggaggttaccgtgatcgacccgaagtggcttactgagctagccccgagattctacaagtcagcagacccaaccaagatgagcaagaggaagaggcaggagaggattgaacccctgtacgacaggtaccatgagcccaactcctggcgtctcagcaagcgccgagcttgatggctctcacctgtacaatgttctgcatgttctgcggcgctggttcgatcaaattccaaactggaaattttggtgtagctgtaaatattaatgtgactgttgtctcagctgtgtttcttacatgactgttgttagctgagcaggtattgacacatgtaatgtagctggactctgtcctttgttgagacagttcccatgaatttttccgtttgcctaaatgccaacgttcatcattaagtgatgcaattttctgagataatttggatggcccgttaatcatttacctgttgggtacgtcggttatttataacttgttagtgaattcaaatattgctgtgcggactgtttatcgtttctaatgattacgggatgcttattgaaagattgaccttttttatctgcctacataggatgagagatacttatgtatgaaactattcccttcgccctaaaatataaatatttttagctctaaatttggataactatgtgtttagatttatagctaaatattttatgatgaaggtgtagttttttcttccagggaaccatttgaaatagaagggatgggagagcaatgtagataggacgagcttcagggactatttaagtacgtacagacataggatgatagaggcatgtagacataggatgaggtacttcagtaatccacatcttaaaataagagtataactataaacctaaagataagagtacatttagtgttatagttaaaagtcaattttctagctatatatatatatatatatatatatatatatatatatatatatatatatatatatatctccataagagtgttcacattcataccagaagtataaggatagcacgtttgaaacttaactatatacctaaagataagagtatactccctctgcatatgctcatacgtactaccaggggtaccgttacaataattcaaaatcagttttactttcgaaaagaacatgccaaccgaaatatatgatgatcgaagttgatttcgtccgttatcaatttctgtccgacttgagataaagctggacgacaaatcgatctcgtatttgaaggccccattgtttggattatgcttattcctataagccaaattttaaattttagaacttaattttgaatttgactttttggtattttttatcgtactttattttacaacatttacttttgagttgctaagaacatgtatataaaagatttgcgcacaaatagtcttttatttggtaataattgatttggataagcacattaataaacgaaataatgtgatgcagcaacgggggttcccgatctttcgatgagaggaggataaacttcgatttggggaaggatacgacgttggcggtccgactacaactaccacaggggtgctgcgccttagcaaccgatacaccgactccacgttgttgctgttcttgccgtgccaagaacaaccttgaacctgcaaacaatcgaagaacaagcaagaacaagttgacaaggaaacagctcacggcacttgtcaaatgatgaaacttaaacaaaccaaaatggggttctgaatacaagtatccgggtggtctagccgacacacgcgagtacaaggaagtagctgcagctaaacttacatcaaaacaaaacccaaagtgcaaaatggtggctgctaggagtttatataggtggaggaatgaccaggagaggaggtgggagcaaaccctaggttttgtggacccctaatgggctgtaatgatacaaggcccaagcccaagtttctgatgtaaagaactattttcgtcattctgagcagcctgggtcaaagttgatggtgaggccacacatagcagaaagtagacgacgagatctttccaacaagtactcatttgccccgtttgccctccggagtgaagagcattgacttcatcaaatcagcgctgctagtgctgcttgcgatttggttcctctcccatattcctaacaacaagtagatcacaacaaccatttagtagcacccaattctgagaagaacttgtatgattagctaggaatgactttacctgataattaagttcacgagctcgagctctagtcattggtccttgctgtgcaataggcatggttgtatcgttggaagggatgtcctcatcatcctccccttcttgcatttgagtcgtcctcgactctaactcatcttcttcttccaaatatggctttaaatctgcaatgttaaacgtggagctaaccccaaaatcggcaggtagctcaagtttgtatgcattgtcattaatcttttgtagcactttgaaaggaccatcagctctaggtagcaacttagattttctcaaattagggaacctatcctttctcaaatgcaaccaaaccaaatcaccaggttcaaaagcaacatgtttctttcctttgctcccagcaagtttatacttaatattcatgcgctctatgttctccttagtggtctcatgcagttttaacatcaattcagcgtgatattttgcatcaaagttcactctctctgaagttgggaggggcaaaagatcaattggagcacggggtagaaggccataaacaatctcaaaagggcacttcttagtagtagaatgttgtgaacgattataagcaaactcaacatgaggcaaacattcttcccacattttaatattctttttcaaaacagccctaagcattgtagataatgttctattcaccacctcagtttatccatcagtttgggggtgacatgtagtagaaaataaaagtttaatccccaacttagcccacaaggttctccaaaaatgactaaggaattttgtatcgcgatcagaaactatggtgtttggcactccatgcaagcgaacaatctcacgaaagaacaaatcagcaacatgtgtagcatcatcactcttatgacaaggtatgaaatgcgccatcttagaaaatctatctacaacaacaaagatattgtccctccccttctttgttctaggcagccctaaaacaaagtccatagaaatatcctcccaaggcacactaggaacaggcaaaggcatatacaaaccatgagggttaaggcgtgacttagctttttggcatgttgtgcagcgagcaacgaacctctccacgtctctcctcatcttaggccaaaaaaaatgatcagcaagaatatcctccgtcttcttcacaccaaagtgtcccatcagccctccaccatgcgcttcctgcaataatagcatacgcacggagctagctggaatgcataacttattagctctaaacacaaacccattggtgagaacgaatttgttccaagtccttccctccttgcaattcaacaacacatctttaaaatcatcatcgtgcgcatattgctcttttattgtttctaagccaaaaattttgaagtcaagttgggatagcattgcgtaacgtctagacaaagcatcagcaatgacattttcttttcccttcttatgtttgatgacatatggaaaagattcaataaattcaacccatttagcatgcctacggttaagttttgcttgacttcgaatgtgtttcaaagattcatgatcagagtgtataacaaattctttgggccataaataatgctgccatgtttccaatgttcgcactagagcaaacaattccttatcataagtagaataattcaaactaggcccactcaatttctcgctgaaatatgctacaggtttgccttcttgtaacaacacaccacccaatccaatccaactagcatcacattcaagctcaaaagttttgttgaaatcaggaagttggagtaaaggagcgtgtgttaacttatctttcaaagtgtcgaatgcattcctttgtgctgcagcccaagtgaatgtgacatttctcttggtaagctcatgtaatggggctgcaatggtgctaaaatccttcacaaagcggcggtagaacccagcaagtcctagaaagcttctcacttgtgtgatcgttgttggaaccggccagctatgtatggcttcaaccttggcttgatctacttcaattccctgcggagtcacaacatagccaagaaaagagactcgatctgtgcaaaatgtgcacttctcaaggttaccaaataaacgtgcatctcgtagagcatcaaaaacagcacgcaaatgaccatgatgatcctctattgatctgctatatatgagaatgtcatcaaaatataccaccacaaatctgccaatgaaagcacgtaaaacttcattcattaatctcatgaaagtactgggtgcattagtgagaccaaagggcatgactaaccactcatatagtccgaatttagttttaaaagctgtttttcattcatctcctaacttcatgcgaatctggtggtaaccactacgcaaatcaattttagagaacacaagtgaaccactcaattcatcaagcatatcatctagcctagggataggatgacgatatctgattgtgatgttgttaattgctctacaatccacacacatgcgccatgagccatctttcttaggaactaaaagcacggggacagaacaaggactaagagactcacgtacataccccttgtcgagtaactcttgcacttgacgctgaatctcctttgtttcctccgggttggtcctgtatggcgcacggtttggcagagaggccccaggaatgaggtcaatttggtgctcaatccctcgaattggtggcagccccgatggaacctcctttgggaaaatatcagcatactcctgcaaaaggttagtgaccggaggaggcaaagaaataggagtatcctcaattggaaataaggtttctttgcaaaccaaagcatagcaaacaacagtgtcagtgtcaacttcatccaaatctgattttgttgcaatgaaacaagatcccttcagcttaatctcatttttattattttgaacagagttggtgggtttcttcttatgcttctcaagttcattagccgcaataagatgctcactcctagtacgctcctgatttttttgtttgctagctctagcaagttcatcctttaaaataacttcaggagatataggatgtaacacaagtttttttccattatgcacaaaggagtattgattggatttgccaaagtgtaaagaatctttatcaaactgccatggcctacctaataacatagaacatgcttgcataggcacaacatcacagttgattgaatcatgataagaaccaatggcaaaatgtactcttaccaatcgtgttacctttaccttgccgctgctattaagccattgaatatagtagggctgtggatgtggctgtgtgctcaatgcaagtttctccaccatttcagcactagccaaattattgcagcttcctccatctatgatcacgcggcaagagcgttccttgatcacacacttggtttgaaacaaggtgtggcgctgattctgttcagccctttccatttgtgcgcttagcactcgctgcaccacgaggctctcatagtgctctgcagcttcagccccaatgtgttcctcatcttggtggggcgcgtcaccttcccctgcattgttagttgcaagcaaagcataggtttcttcatctaaatcactagcagaggagtacccaccatcagctctcacaatcattacacgagtgcttgggcagtccttgcgcacgtgaccatagcccttgcagcgtaggcactgaatatctcttgtccttcctgatgaagctactgatgatgagctcttggaaggtgtagcagcaacccctcttgttggttcactcgggcatggtgtagagtttgttgtagagggacgcagcttgttgcttgaggacgatggtgctgctgctcgagttgacggtgcagcagcgttagaagatgtccaagagctagcacgacctgcagaaatgttagtcctgaagctagctcttcgtccctgtacttccctttcagctttacaagcaagatgaaacaaacgattaattgaattatattctttgtaggctagaatgtcctgaatttctcggttcagcccacccatgaatctagccataccagcatcatcattttctaccaatccacaacgaagcattcctgtttgcaaagcttgataatactcctctacagatttgtttctctgtttaagttgttgcaatttgtgcagcaaatcacgtgcatgatatgaaggaacaaatctagctcgcatgactcttttcattgcaacccaggtttggggagtgttatttggattggaacgaacaaattcactccaccaaatggatgcaaaatcagtgaactcactagtagcagccctaacacgtttattctcaggaaaatcatggcaagtaaatttctgatcaatggctaactcccaagtaagatatgcatcagggtcatattttccatcaaagcaaggaatggtaaacttgatcttgcctaaagaatcatcattatcacgtacctcccgctgtggtggagcgcccatgccatggcgctgccggcgctgttgtctttgtggacgaccaagtacctcctcatcatgctcagtgtcagcagcgtactccagttcttcccttgctgcgatgctgctattagcatcatggccattgtggttgcgcctagccgatccatcatgaccatcttggcccattctctccaacgtattcaagatacctgcaagagaagtgttcacagccacaagggacctctccaatgaggaaagcttggagttggtgtcaatttgagcagcctccaattgaccaaggcgatcattggcgaccctaacatcctcatcaaggccttcagcatgctccctcacttggcgctcaaaatgttgtatgatgcccctcgtacgtggtgaatgttgagggtgctcccctgatcctcctgtcatggttaatgggaagaaacaattcacaagaaatatgtcctatcaactattggagctaggtgttgtccatctccacttctaccaaacttgtgcaaacgagttcttacatgttcttactttgttatgtaaaaggcgttggcaaacagcaagaacagcaacaacggttagtagtaccggagccgacaacaagcacgatcctgtgatatagtagataaaaatttgtggagctataggtggctgcaagtaatatcaaggtacagctagaaccacattaatcaaagcaagttgaataatcattcaacgatggtattgtgctggtcctaggcaaaaccctttagagacgcgagcctagtcacaagcgtagccactcaaaatagcacgaaaataacacaaacaaaacagcaacaacaacaacttcctctcttcccttcctttttttttccttctcttcacttctgattttttttctttcttttttttgttttctttcttttttttttgtacagcaagctcaaagcttcagccaacaagtcaaaacaagaagtaatgatgggttggttggctagttacatgattcagccaacaagtcaaaagtgagagcacttaaatgctttcttgggaagggctgattcacttcaaaaagttgcaaaagggttggctgttggtggaggcagcaataaatgcatttgggggtggctgatgtggtgatgagggtgctgctggttgtggtggacgaaatttggtggggttggaggtggatttcgtggtgaatatggtggtgatggtggcagcgggatgaagataaatgaagtgatggtggaagtgtttgcggtgacgaattcatgagcagaactcgaaactctaaaggactaaactactagaaccagcaactcaaccaatcgatgcaatcgaaaactcagcaagcaaagactaagtagaacagcaaaggctcaacatgttttggtgatttcgggtctgacctattttagtggtttttcttttgggctgtaggtaaaaacaaagaagtgataaaatctctcaccgagcaacttgagctctgataccacttgatgcagcaacgggggttcccgatctttcgatgagaggaggataaacttcgatttggggaaggatacgacgttggcggtccgactacaactaccacaggggtgctgcgccttagcaaccggtacaccgactccacgttgttgctgttcttgccgtgccaagaacaaccttgaacctgcaagcaattgaagaacaagcaagaacaagttgacaaggaaacagctcacggcacttgtcaaatgatgaaacttaaacaaaccaaaatggggttctgaatacaagtatccgggtggtctagccgatacacgcgagtacaaggaagtagctgcagctaaacttacatcaaaataaaacccaaagtgcaaaatggtggctgctaggagtttatataggtggaggaatgaccaggagaggaggtgggagcaaaccctagattttgtggacccctaatgggctgtaatgatacaaggcccaagcccaagtttctgatgtaaagaactattttcgtcattctgagcagcctgggtcaaagttgatggtgaggccacacatagatgaaagtagacgacgagatctttccaacaagtactcatttgccccgtttgccctccggagtgaagagcattgacttcatcaaatcagcgctgctagtgctgcttgcgatttggttcctctcccatattcctaacaacaagtagatcacaacaaccatttagtagcacccaattctgagaagaacttgtatgattagctaggaatgactttacctgataattaagttcacgagctcgagctctagtcattggtccttgctgtgcaataggcgtggttgtatcgttggaaggatgtcctcatcataatgggatgtgattatttatccatcgacacatgtacgaattaaattgactctacccgttacaacgcacgagcatcttttctagtatacatataaataaaaaaaatatggatatacacatagtttatatgtataaatataaagtttatactatcagcttcctagccagggggggtctctacttggccagtttgcttattttcgaagagaaggcgtcgcattgtgcaatcggtgagccagcgccttcctggaaaggcactaacgtgcaatcatgcaggaaggtccatgtgcctcctcgctcttcaaaccatgaccacggtaaagcggaaacacccgtgaacctaggtagtggactagaactgctcgggcatgacaacgtggcgtgtttgtgggtgtgcgtaactggtcagttggttgccctggaactaaaatggggctcgtagtctatctagaaacaaccacatgttctgcattaaaagcataccgggctagataaagtgggtcacccctcctcggagcttaatgcatgtttttctccgagtaaaacgaatctacgttccacgtgaatagccataggaacccctcgatcgtccgggaagggctatcatggcattctcgcaggcctagaaacaaggacgcggcctaagggtcccatgttcttgtagatgcagtgtgccggctactgaacctgtcaatcccacttactacagattctctcaagttgccccattgaatgtcgagacgagatttccataactccaaagtcaggttttcaaaccactgcttttgaagaaacaagactctacatgtgggtctggcgtgatagttttcctcagcggctacataggcattgggctcgaaggacaaaatggatacttatgattgtaaacaatgtaagacgtctcccagcggatagtatgagagagacaataggatataagagcgtggctagaacttagtagaaggattagacccttatatctctcagaaatcttgtacaccttaagagctgactaccctgacgtaatagagtgagaatacaggagtagggatctcatcctgagagtaggcccgaacctgtatacttgttctctgtgttacttttctcttttccaaacaactccaaaaacaccaaggaacaccaaagcctctctacaatcccggatcgtggttccctatgtttgtcggaactaatcctatatatatatatatatatatatatatatatatatatatatatatatatatatatatatatatatatatatatacacacacgcgcgcgcgcggacagcgccacccacaggcgctgcgcgccacgaaacaaaatggcgccagacacaaacgaggagaggtcagcccaccaccgacaaaatcccaccaacaagacatccaacccacccacggagttaaaatttaacttaggtacagttggtggtggtggtgtggtgatatcgttgaggagttaatattatgcgatgattcagttggtctgagttaaagtttaacttagatacagttgggtggtggggtaaaaccagcggagttaaattttaacttagatacagttaggtggtgggtgcgatgacgtcgttgaggagttaatattatacatggtttcagttgatattagttgatattataaatggttttggagttaaaaaattacttgttgttgttcaattctggatgatatgtgattgagtctggtcgctgctgagttaaaaattaactcgcgatacaaaactgcaggacatcattgtagagttaattcagtttgtatgagttaaattttaacttatgtacaacaagattttaactcaacaaatacatcctcacaatctataagcgtaagttaaatttttgtcggcacttgctccggacatcaacggcggagcgtcatggaggtgttcgccgttgctcctccatgtccttcggtgttcgaactcgccgccgcggaggtcgccgccgtgtgcgtggggcgcagagcggcggcccgatccgccgccgcctcggctgtcgcccgcagtcgccccgtcacgggatccgccgtcgagccacctacatccacgcctgacacacaccaccacagccggatccgtgtacgtggggcgcggagcggcggccagatgcgccgcccccttgcctcgccatgccatgttggatccgccgacgccacgccttcccgtgcaggattattcccggatccgtcatcgcgccggatacgccctaccatggccggatctgcgcgcgtggggcgtagatcggcggccgggtgcgccgcctcgtcgcctcctacacgccgtcaaccgtcgcctccacgcctgcagccgtgccgtaccggatctgccaacgtcgcgcccgccgccgctctgtagtggaggtggcactcgacgtcgcgccgccagccgtgccatgccggatccgcccaatgccgccaccgcccgccgccacgcccgctcgccgctctcatctccgaaaaaataggatctggatatgtggttggttacgggatagatgtacaatactggtatatatatacactaaaagttgagtaacatcaagttaaattttaacttggattatgggcgtgggggagggcgcaggtatggggtgtcgtgagttaaattttaactcaaatacgtggtggtgggtggggggaaggtgggacagggtggtggtgaggctgtgtcaggcgccatctaatacgtggcgccggtagcgccatatagtagttatatatatatatatatatatatatataacacccttacgtgccatttagctaaatggctctcctcacaccacccaaccacccaccatttgtatgaataatatttttactcccctaccaactctcccacccacgtacatcctgcccatcttcgtataaggaattttttttttactgatgcatgtctatttatattagttgcaagtgctgatccacaattccctattctttctctctcattcctcatcctaatttttcggatctagcaattcgcatccacagcaggcggtgagaggagcaacaccagtgacatcgacggccttcggtgagtaggcaacgacggccgacggaagcctccaatacgcaagcagcgggatccaggcactaggcgaggacttgctggcgtggagcaggcagtgcccacgggatttgatcggcggtggcctccggctactccgctttccgcctaaaccgccggtgcccaacgtctagggtggcggcgctctaggctcacggccagagaggagccttgctttgtccggggccaacatgcaggagcactgtcgtcggtgaacccctccgaccgggatcaatccatcgtcgccgccccccaccaggagccttgatcctgcttgggtgtttctatgccaacaactactggcggccaggatgggaatatggaattggggctgcggttgaatttgtatcgagttcctcgcaggcccttctgctaccctctctgcatcctctttgtttgtcaagatggtagggaagcagatcttgctcgacccagtgaaggagcaattcggcatggatccagtggtcagagacgaggattgaggaggtcgtcgctagcttcttactggtttagatgcagaatgttgctggggagaagcatagaggaggatgtctcctccacgctccatgaccaccatggcctcggcaactccgcgcaccgggtgcctgggtcctgtgttgtgtattgtgtttatccattattattctttttactctacaatggtcccaagtcttatttaactggtggcgaaaggggctttactcccggttaggaaccccctatagtcccggttatacaaccgggactacgaatgtatctttagtcccgggtgaaataaccgggactaaaaatccatcatcttttgtcccggttgatcttactaagtaggactaaagactttttttcctccttcggttctttctcttttatttttttttagtttttttcttcgttcatatcgattcattcacagtaaatatattcattcacaacatcacaaatatattcacacagattcatttacaacatatacattcacagaaccattcacataaacattcacaaacacattcacaaatcaacatccagaaatcaacatccacaaatcatcaaaaaagaaaagaaaaaatcatccacagatctgggcccaggaggggagggcaaggccggcctccatcctaccgccccttgcccggccggcctcccatcccgccgccccgcgccgggccgccgccggccggactccattccgccaccccgcgccccgccggtgccggggccggcctctcatcccaccacctcgcgccgggccgccaccggccggcctccatcccgccgctgcttccgtcgccgcccgccggagggttggggaggaggagaggagagaaggagaggatcctcggcacgtaagatggcgaggagaaggggatcggaggagaggagaagaatagatagggtgtgaggagaggaggagatagaaccgggagggaggaggagatatttatctcgatccgattcacgcgtacgcctcgatctctccgcgcatgccgatcttttttcccggttggtacaccaacagagactaaagatcaaaaagtagctctaacctttttaaccgggactaaagattacggtttttattgtaaccgggactattgtggaatttggtcgaccaacaaaaatggtttctctaccggtgtttgcaatttttttactcaggatgttcaatttatatacggcattaagtgagtaaaatatattatccaccgatcaatgaaaaataatggggagtgaaatttctttctaatctttattgagtccctacaaggagtaaatttttaactacctgtacatagaaggggagtaaaattttaattacgtgagtaaaattttaactacgtgtacatgtaggggagtaatatttttattatgtgagtaaaattttaactacgtgtacatataggggagtaatatttttatcacatgagtaaaattttaactagtatagatagatgtgagtaaaaaaattattacgtgtatacagaggtctggttggtctcatttcactgaggaatttttttactgaaagtaaactaacgaatgaatgtgggatttagctgaggaaattgtttacggagattagaactattggatgaatgtgggaaaaagaatccaaaagattaataaagcaatcgttttactaacagaacaagttttcctaaacagataatatacccagtaaatttttaacttcatcctaatggagcggtgggagtattttttaacacataccagagaagcaaggtgggcctccatggcttcattagagaaacggaaaatcaggacgtgagatgttgtgagcgcaaaaaaaggaaaaaagcgggcgggctgctgttgttactggcgttaccttgttggtagcacgccacatgcgctatgtagcgttaccgtgtgtgtgtgtgtatatatatatatatatatatatataaccccatacctacacatatgtataaatataaatatgtataaactttacatatgtatagaggcgatggactgaccatgcgcccgagcccacgtgcagtcagccacacattagctaccccttcctaggtctttgagcgtggagagtggaaatgtactgccagtttctatccaaggaagacagggcaccacccatcacttgccgatgatggggttcacaaggaagtgtgtaacccagaggattaatattggatgggtcattgatacctccatctatcttgggctaggtatgaagtattatgggcctgtaaaatgcacagcctgctaattgattaggactcaagactcaagaggcagttttggtgtatgcgatcaggatagctcagatgagagcagggccgtcgatctaactatctatgcatgtttgcaggtgaagtggcatcatggttgttttgctttataggagtaaatgtcccttagtttttattttttacggttaaaacaacaggagaggctcctactgcgctatattaaatatatagatattgtacaggggcgaaaatttacaaaggagagggagagacagaacatgaaggaaagaaagaagaaaaattgagaccaaaagaaagatctaatttaagttgtgtatcgatgattgccaactgggtttgtttgcctcgtttactctgtgcatatgccgagtaaaatccttcttgaaatatgctttccatctatcaaagttgatcggtatgttgttgaaaatgacatcattccatctggcccagataagccagcatccaattcctatgacctccatgaaaaaagagtgagggaagagacttcttattgtgaccatattcatgaattccttaagttccatgttataccaacctggttccagcattgttgggcaaaagggcatgtgaagaacagatgaaggtagtcttcagttgttgtagaatcacagatattgcatctggctcccccttgggttttgaaatttttttttggaggagttctttggtgtttagtctatccataagcaacaaccataagaagacctttatcttcattgtgcatttacttttccatatcagagtgatcgaaatctcaggctgaatgtgggcaaagaagaggtcatacattttcttggattggaagtggttaggcttccacgtgtagttccattggtcaggatcagtattgaattatattgcttggatggagcttgccaaaatttgccattgagaaacagcttgtgcgggaagtgggatgtaaaagaggttttctatctcatttgagagtttgaaactcctgaaggaaatgccttcttgtcttgcatataagtacagaaggctgagttggttatagttatatagaaagaaaggatgtactattatttaccacatcatgccttggtactagatgggccatttcgaggcccaagttcagctagtgtacacattaggaaggatgaaccatgtcgagggcctttttgctagatgggccatttagaggaccaagttctactagctagtgcacacatattagaccatatggctcagcccgctctcagactacattagaaaccacccggttcaacacacgctttttttctaaggacttggaatatctaaatcctccaatgtgtttaccctttacctagttgggaccaaccgaagtcatctcggggaaagaggggaaaatccccctgtgtgaggctcatttgtcaatcccatggaccggatgctcgaccgtctgatcacacaactatgtgccaagccaactgcgctacatgcaatcctatatgttgctgaaaactggagcaaaatatattccatagaggttgtaagttcaagtgatattattttggttttggttactaattgaaaatctaattatatgagactaatgtttctttgagtagtatcatttacatctgaaattaaaaaataatgatgagaggttatcatccatcaccaaagagagaaatgattgcaatattttggaataaatgataacttgacttttatgggaataaccttttactctatgtaaattatcaaccctattatcaactaggatatttcctgataataagatatgatagaaatgatttctttggcaatggaccttaatcacatcaaggatgaaatccagagataaagcgatatgtatcatttcttatctccatctacattttgataggctcatgtatatgattatcatgttattgatatattcatgtgagactaatgtttaattgagcttaatcttatttagtctcctctatattgaaaacatgaaaactatgaagatacgtgtttatgcttatctgatctatatcttttccacatgacttctatgtatgtatcggataaactcccattggttcaacttttattcatacatttgcctctcactgaaatattttgtatgcatatattcaggggaagcgaatcctatacacttattatgcatgttctggatccatgttgttcacctattctttatatttgatctttgcaattgagctcgcttgcgtatatatgacactttgtggtgttaatgaatgctcgacaatttgatttgggcaattggtcatttgatcctatttcgaagccaaactaccaatctaacccaactttttctagttttcttatttgaccacactttccaaaatcaaagataaaggttgactctattacgttaaggcgagttaacagtgttaactaatggtcaaatagtccctttacccttactttttttgacactattatatcaaaacatgcatatattcgaaccttttgacgtatttgtaacgaatttgatatatctttcacatttgacacaaagcttgatagatttggcttcaatttgacaaaattaaatcaatttaacaaatttgacttcaatttgatagatttaagtaaacaaaatttgacataattttggtagattgattttggtcttgcagtggtgagaaagcattatgcaacaccaattgtcaggacgatcaaatattgatcaaagagtaagccaattagccaagaacaacaacaccatcatctcctctctgcactcatcctgcttgtccctccatgcaacagccgtcaccgttggcaacccctccctccgcgcactgatgcaaccatcgcctcccttcctccgcgcaccagtgccgtcgttgcctccctccctctgcacgccagtgcccgccccctctttctcctcaccgagagagatgagccagagagagaagggaggtcaggagatgcccaaatggatagggttggagtgagggtttttttggttggtttaaataattattatattttttcctttttttctaaatgaaaccctaacagggtagtgcaaatagggtcaggcgttatgttcaattttgaaaagcagggttaaatacgcaaactaagaaaaattgggtcagatcgctagttagccttcaaaatagggtcaaatgatcaattgtcccatttgatttatatatttcatatgcaatcgattggtcatcaagtggaggatgatgaccgatttgttaggagtaatagatttcctttaaatcttgcaaaggaataaatcctaccatgatgaagttaaaggtagaaccatagcttgatggtcatcaagtaaaaggcatcatctgtgttgataaggatggaatcaagctcataatgacaaggtattcttgataaagattgaccaagactactatatgaagatggttcaactgaatatcacaagtgttgatcatagagcaggaattgaccccaagttggatgagtgcaaggcaaatatatgatgaagctaagaatgattttcttagtcttttgttggtcttgatgtttggagcaaagaccgggttgctacataggcatcatattattaagagggatcaatgattagtggcttgatttgaaccatgtgcaaatcactcaatcttatatgcatgatcgttttccttagccatgcacattaaggttttttatggtttgagtgaggagtccgggtcggatcttgattctttttaggctaaactagagcctttgacatacatgtggtaagacttgtttagatgtgtatcatgcttggcttttatatcttgtccacccgcaagtctcgttggagttggttgtgttgacaaacaaagagttggccatgtttaggtgtggttctaggcaagtgtggcgagttttctcaaaatccaaacaatgagagaagtgggcatgtccaataggagtgagtggcctcatgtgggtatgtccggtagagtatcttttggagtttgagccctatatccttgagaaaaattgtgactattagatggattgctcataggtggatagccttatgaacaagctttccataaagtgcaaaaaatgttgaaataagatacccgagtcatgtgaaatcgtctttttctgatagacggttatcttgaaaagtggcatgtgctccgactgatgggtgaattgcgatctgactagggagatagagctgagaccgatcagaccaagctaatggcggtctaaccgagctaagaacggtcataccaggccacccatggtggttagactcgccccctatgatgtgacaggtagcagctagtattctacttgttgccttgatggccagtctgctttttgcagcctgaccgatataccactgtgacttgtggattttgccccaaatggctagtttgtcttggcgcgtgtataaaggcatcctcactagcagcaagagcaaggtttctcgcacttcattgcattatcttgagcccttgcaagaactctcgcacccttgtgcacttagtttatctactacggtgttcgagagtgaactaagccaatccaagtgcatttcttcattgttaaaactagcgtgatacttgaccatgcatcctcagcaagtatcctagacatattactcttggaggttgccacctcgtggatggcttgcaggagtttaccgcctttgggaagtcatcaacaacctacacattgaagcacatggcgaggggagccaaagtcggtttgggcgtccttgtggtccatccaaccttttggcccacctctcggccactccttcggttgggtagctgcctagtgattcccctacatgttgtaccttagttgggctcaattgtaggtggttttgattaatatgtgggccctccaatttgtgtacatcaaacaaaaaaaacttggttgtgcattcagcacaacttctttattctttatccctaacctgattatatgctattcccaatataaactctacctaaatcattcaattaccagagtgtttcatcactagcaaacaaggatcataacaaaagagtaaacaaacattgataatttcccttaaaaacaacgaaaggacctccgatatctttgtccctcggttattgtgataagagcagcatgaaaaaaaaatgaacaattgatacttatcatttaatggctcgccgcataatgcggcaatttggtttttgaattttttattttaaacaaaataatacatgcccatatatttaaagaaaacgacaagataaggtgcatttatttgctgctacataaaaatgattcgattcattatgatacgattaaatgcacgccatctttctttgcactatttaaacaccacaatggctaggtgcatcctaagttctatttctttcttgcagaagcatcagggattgcttgcttcgtgcttctcttgctatagttttgaatctcttcacttgaatctcatcttcacttcacaatgtcaactatccaggttcctaaccctaccgaccccgaacttgctcaacggcttgttcttgatctgctagatccagatctcagagggcatgctctggctgaactacgcaaggtaatgcatatttttcttcattatctattataactattctttttatttgagattaaagggttgtattgttcgtaatttcatatttactcatataatgaatacaacagtaaggtcccctttcttggttcaagattttcaaaaggcaaatattttgctaaacattattggaagacatcggcctctctagcagtagatagatgcaaaaatcgaggtttgaaagatggattgcctaaaacacatggaatatatatatatatatatagaggggggggagggggttgctaggagatcacatgggccacgcttccactagttgcttgtgccaaaccaatgaaaccatggcagtgttgaaaatagataatgaaaccatggcagtgtttatgggatatgtactctagtttcttggctgtgttgattttggaaagagcgaaaaccttaattgctttctcttcttccagcattagaggaccaacaatggcttttggaaaagccaccaaaaggatgcctgttttgtcgcaatatcaaagtagacagccgaaacaaaatagatctaactaggaaacttaagtagtataaacttattgcagcgtagaaatccaaaatcacaacaatacaaaatttactcacattataaacttccctttttttcttaaatggaaagtcaacacatgaccagaaacgttgtgcacactgcatacaaattctaaaaagctaaaataactgacaacatatataataaacaaaccaaatatcctaattaagtaaatagatatcccccattaataataacaaacaaaggaaacaagagtctttgaacaaaacacaagaactaaaaccaacacataaagaagcataacatttatataaaatggaaatatttcactgtattccttagcaaagcactgcttgagatagtggtacttgcatgatttttttcataacccatgcaaaacacacaacaaatagctagtagcatcagcaaaaagcggtggcatgggatatgttctacatcatggtgggccaaaaccctggttaatatgtaaggtcacttaactctgggtccctggtgatctaagatattaattatttctattatcaataatattttcataataattcaccaaaaaatatttttttttatttttatgttgattgattttgttgtggtccttacataaacaatattcagttattgtcctattacattgtcatacaaagaaaaattatgcatttgtagtgatgttgttgtctatatttttagaaaagggagatgtttccagatttggctccactattgtggcactcttttggcacaattattgtgctgctacaggtaacattcttgagtagtagtttatccattgtgttgtatgtccatgatcaatcttttgttgaggagcccctcaacaccccccttcccctccaaaaaaagaagtgttttagtcaaccattctccacaattcagcaattaaaacacaattgagttctatcatatctcaattatgggttaatgtaatttattaatgtttgagctcacttttatttgtgttaatgggtactcatatgtttttattcttgctataataaataggagattatagtagtctaccctgtcctttcacccccaacattatcattacttgcttcaagtcgagtctgcaatgcgcttgcacttcttcaggtacacgctaagaagaatacaacaccactagaaaatattaaagctgctattttccatatatcatatcttatgtcacctttcctttttcttttttactttcttttctttattgcagtgtgttgcatcccatcccgagactaggagccatttcttaaaaggtaatgagcacaaccctttgtatatcatatctgaaacttttgatgtgtattgttaattattttccatcctacctaaatgttgcgattcattatcatgtggtactagatattccataggtcagtgtaggccttgctaccaatctagatagtttatagtatttttttttcactttcatggtacaaaccttttgagctttggattggtttgtaacattcaccctttcgattctttttattttcagctcatattccattgtacctatgttcatttttggaaaataccagcaagaccagaccttttgaatacttgcggctgaccagcttgggtgtcattggtgctcttgtgaaggtaatacatactggaaactttggcaataaaaaaaatcagttattactctgaaaattctttagcaggtaatgaaacaatttttctttgcatttaagttaaaaaaaggagggatagttcactacctccactacaaatggtaaatgtttgattattcatgagaagtgcaatgaacagttcacaattacttggtgtataataagaaaatccttactacaaaaagtagcgttcactgtaatgtttcttcttactgtctaaaagtttttgtcatgtatagcaggatttgatgaattcatatagtttatatccaaaataactggcaaatatattatcagcacatgagacaattattagcatcactgaggtttaataaattcaactgtttgtttcaattcataccagtaaaactagtatagatatctcaataacttctttaaaattactccctctatatttaaacatataaacattattaaccttaccccgtcaaaatttgaccatcagtaaccctcaaaaatggaataaatcatatttggtatattcttctttagagtaaatttcagtgtggtccatatatttttacccatgttgcagcttggatcatatcttagccaaggttttcactttgaaccacttaaacttaccatttgttgtccaatctgaaatttactcttttcgagtaaatttcagtgtggtccatatatttttacccatgttgcagcttggatcatatcttagccaaggttttcactttgaaccacttaaacttaccatttgtttcactctagtccatctcttgtcttctccacgtccgatgggccatcagagatgtggcaacaccattgctcccccccactctttctctctctgctatctgctgcatcgtgcccaactccagtggtttgatctgtagggagaaggagtagtgcagcagtgcccaactcctgttgcctactttagagggaggagctagcgaagcgtggggtcgagcgcacagctggcacaccagaggtgctagtgatggacatgaatggactaatggacctcgagcaagggaaagggtggacattggacagttttgagctccttagctcatccggcatccgcacaagcataactacataagcggtggcactgccgatcctgatgcattgctttgctttgatcttctcacggcagcttgactgcaacatagcgccagctacaggcacacgagcggcagaacaaggcacgtaagcatcaaagttggtttctatttgagtcaattgcctggccatgcgaatcgtcttgccagttgccactggcctctcaacacatagcacataggagccatcattggtttgatctaatccagcatgatatatgccgtttatccccttatgatcagtgctcacctcatccttcaccctgggtgaaatagccatggtagcagctcaaggcagtaccccactacacctagtccaaactggtatgttttggcaaggttagatggtgctaagtgaaaagtgttgatagacccttgcccattgtgcaactatggtaatgaaaaggggtccaatctgaaatttactcttttctttataagtactttttataattataattttgttagatattattgctatattcttatatataaatagtggtcatagttgcacaccaaaaattaaataaattcaagaatgtcgtatatttagatacagagctagtatgaactttatggttcagtgttgtatagtttgcagttgaagccaaattaatttgtatctatggctaaaatggcaaagccttgaaaaaggacctataattttctttatgtacatgcaacataagaaacctttctttctttcttggggtgttccacaaacatgcctatgaaaaatgaaaatgaagcttcttttactttttgttagataatggattaaaccggcctctacatcgaaacggatgtacatagccataagcttcttttacttgtgatacatgcaggctgaaggtacagaagtcatcaattttctactgcaatatgaatttgttcctctctgcctgcatgccatggcggtaggcagtgagctttcaaaaactgtaagtaaccagccatatcaatcctctcctaaaataacatcacctttaattaattgtcttttagtattctttcctatgtaaagtttgataggagcacatttttattttcagctagcatcagctcaaagtataatttgtagcaattcatttattgatatatagtgattctttgtatactttgggtcttgctgttttggaatactttgtagcaattcattgattgatataattgtaccaatctaacaatctagatattgccattttctttttgttacctatgtattaatcatgtatatatctatggtaagtatatcatatatatatttgcatttttatatgtgtgttttcagtgacatacactttgattccattctggtaaacttattagaaattgcatccattcactgatttactcacctatatatgcaggtggcaacttttattattgaaaagattgtcttggatgacgctgggcttggttacatttgcgctactgctgatcggttcttcgctgtggggactgccttagcaggcatggtgacctcaatggatgacaagccctccccaaggttgttgaagcacattatccactgttaccttaggatcacagacaatcctaggtttgtttcctcactttcattttgcagaattatcttcattttttcaaacttctaaagccagcaatgccatttcgatctacctcctctgcaatgttccaggggcttggaggcactgcagacttgccttcctaccacacttatagatgggacattcaacaatcttactaaggtgagttgtgtattgtagatatacattttcactaaaaattactactacttccatccccaaattataataatttttagctatgtacctggatggacaagatatacaaccagaatttattatattttgaggtagtatgtatcatccaactgaagtactattagactaggctgataattgcaatcaactctgaatataaatttgttttactacaaatgcaggatgaccctacaatgcagcaatggctccaagaactgttggtcaaagtgaggagtggaaaaatgggaggactacctcctccagttcaaggtcacatgccgagggtttaaaccaacctggttgctacaaggcactgaaatgataaactatcctcatgtgaattgcagctagggaataaggaaaggtcatgcaaaagaatcactttatgctttcgttgctttgaacatctaaaaataaaataaattggagaagcactcttgtattgatacttctttgtgacatgttgggtgttggtttaaattcttctgtagaatttaatatattttgatgataatgttgaactgttgcaggaaaataatttgagttttgttgatcatgttttgcatgatctggaaaattgaggttgatatgtttttattcttgtggggaagattttttttttgttcttttgacagcggaatgcggaaggatatactattattattgactaataattttactgagatttgccaaggtcaagaattaagcattgctgaaaatttattcttgatccaatgctccataggtctaatgtgagctccagtactccagatatgtctttctttaattactattcatatgagctgcaatgaacagattatcttttgaaacctggttggaattaaatccaaacattgaattcgaaatgtttcccctttccgtcattgcaagaattaattgagtgactcgaatccgttatactagaaaaaaaactatttgattttgtttgttgatttcaggccaactgagactaactcatccattgacgaggtccacccatggccacacatacatcttgacaaactcgtgtcatgatcataggtgctccagtttttttattgttgttgtatcgccctcgagtctcacagcaccattatttttgaaactgcaatcagcaagagatttgctggatatattagaagaaataaagtttgccaattggtacaatcagcaaaagaagaaaagacaaccggctaaagagtgactctttaggggattacaagggagcaaggaacacaacttaaggaagcgctagccattaggtgggcctagaatgtgctattaggtctatattttcctttattaggaatgctacttgggtttcactttgcgacttctgattgaaaattctttgattacgctatagccaaacatcacaccatgcagcggcggagctagggcccggcaagcccgggcaattgcccgggctccagcgtcgcatgcatcattagattagttctaactcacggtgcttagccacagcatgcagcagccagcatgaagcaatataagtatgttataataatctgttaatagatgttacatacacaatcatctagagtaaccaaaagcaccatgattgtttactagtagatcgttttacccattacttgagtgcaagctattagacgtatgcaacctgaaggcaaagtaaattttctagcacccattatatttttttttgcttttcaagataataaattactaagtcccatagcctacaaaaacacaaccatcgttttcttctaaattacaatacgataaaaaaaatgttgtatggtacatagtaagttatatgggatttattatatatccgttggcgttgttaattagatttgcccgggctcacaaatatttctagatccgccactgacaccatgtagtcagaagggcaccgatcattttgtttctttcttttccttgtagtgtggaggttaaagactcccaccaatctgaaatagaattgctgagcagctgccaggggattggttgtagcctaactagctagaaacaaggtttcagactatgtttgtgaaaatgcagtctttagcaagtagtgtagcatcttcgaaggcactgctacatagactacatatccaatcacaaggcaatgtcgacgaaggagattttcagcccacggcgccatataaaagaagagaaatgcccctatgcatgaggtgacgatctctcgcacggtaagccacttccgaaaaccctaaactaattcatgattcttatgggcgttggggagaactgcaagccttgctgcaaatagttctagtacagaggatgttgcagtcaaaccaacagtacaagcggagtcaaactgatatggtcagttttcatttggactactggtagtctaagtggaacttgttggacttgttcttattttgttggattgttcaaatacatattacatcaatctactgtaacaaaagttaagcttacatgacttgtgctcggaaaatggttcgttcaattcgcagatgtgcatttatatcttaagatagagataagctggaatttcggtttcaagctaatctttgtatagacatcatgttgttgattggtaccaatcaaaacaaaaaatcctctttcttgaccacgcctaggggtggaaatgagccgagccaagcttgcaaaggctcacaacataataggcttggtttggctcgtctcttcatatataatttgtaatcattaagaaaagcaaagaataaatcaacaacatgtacttaaaactaattcatatattcaattctttaaaatctagataataaattacaagttgacaaataataactccactaaaaaataatccatataagtacataatgacctagggtcacgagccaaacaattggctcgcaagctagctcgggcacagctcatttcaacgaagagctaaaaaggatgcttggctcagcttgtttggctttctagctgagttcacgagcccgagttttttctttacactcctaaccacacctccacatggtgaaccatattgagaattccagcaggagtcactgtccataatgacgtgatcattttactgcagcgcactacatatgaagctaaaacaacttttgatgttatttgaacaactaagaaaaaaaaacaggagtcactgtccatactgacgtgatcattttactgcagcgcactacacatgaagctaaaacaacttttgatgttatttgaacaactaagaaaaaaaaacaggagtcactgtccataatgacgtgatcattttactgcagcgcactacatatgaagctaaaacaacttttgatgttatttgaacaactaagaaaaaaaacaggagtcactgtccataatgacgtgatcattttactgcagcgcactacatatgaagctaaaacaacttttgatgttatttgaacaactgagaaaaaaaaacaggtgaaaggaaaacagatcacaagaattgaaatacgagtagtccgaccataatatcaggaaatgtaaagaaacaaaagaaaatattcgacacaatgtgaatataaactacaagtttggttaaaggatttcgcgctttgctgagatctacatagggtgaaaatagaccccaactgcatcaagatatgttcctgaacgcccaaagaatcccacgatacaactgtttttcttccgtggagtacggaaaggagtaccctgtggttgtccaaaaggcccatagctacgtacattggtcacaagtgtaagtgatgttatagcctcagataacacattgaatggacccacagttccaataacctccataagaaactctctttcatcaagatcaatctgcgaggaaattaaggtccattacctctgaattcttgcaatgtaattgagttgtatttgtgttgctcattttactggattcgatccaggaagaaagaaataaatgccatatttgttttgcaaagaaaataaaaaataataatgatcaactcaccagttgaacactaccaccaagaccaccccataaactagtcgtgtgtcgctctccatctttgtccaagtaagaaaatgcaagtgcatcgatgattatgccgctacaaatagtaatgctttccaagcgtttgggtgcaaccttgatgtcacaagtgaccccaccatttccaccccatggaccaatcctattttccaatatctgcaaagaagacataaagatataataaaaaagaaaaaagaaaaacaaagttttgcagttttgtttcgatgaatttaaaaagtgaccctatgattcagaaatttatatgtaaacttcatgtattacaagttactacgccttccattaattagtcatttagaaagtacctccttttcctcctccgtttccttctggatcttcacctcatccattaacatgtgttcataatgcctgatcacatgaaccttaggttggttggagttcatatatgcaatcctccgaatggcagcatctgcattttgcacctcaaaaatactggaatccctgcaatcaattcttgcagtgacatccttaagagaggacaggtgctccaagccaatatcaaaatactttgtctctcgaacattaaaagctagctcaaggttttcaagccttggcatagaatattggctaaatataagccccatggcattagtggtaaacgaaaactcagctagccagtggaactttgcatgctcagtgccaacaaccaacctttctggttcaattttgaacacattaagacggagacaacatagagattgtaaggcaccaagactacgaagatcatcctgtcggagtacattaagtatcaaatctatggtggagagggacaataaggatgaattgatccaccttggcaatatggataattggccacatgaaagatatcggagatatcgcggagagcatcttatatttgatatgaactctgtggacagtttacagccatggatgtacaggtcacagattttgtgcaggttgcacaaagaatcaatcaaagtattctcataactatcatgccacgcaccagtactctctgaaatctggagtattcttagttctgtcaaactccctagctccttcaaaaagtttggagacttgctaataccaaccagtgatatttcctgtaagcattccattttcccaattccatcaggtaacttcaccgatgcatcaattagtaggcgcaccagtcttcttagatgaacgactgttgatggaagttcagttatgatagtgtgccttatgtccagtgtatgtaaacaacttaggttgccaatctttttggggagactaccaatatttgtatccttcagtactagagacctcaaatgaaacaaatcactgataccctcaatttggtgattcttcaagtcttgacaaccttctaaatccagtacgcgcaaaatacggaatctcgaaagggatggcaacaagttggtagcatgagggaatacgattagtgacctcacgcggggccacttcattttctcctgtcgtatcgtatggtcatatatgctgttttgaaggcataaccggcgagccctgtttggatgatatgtgggctgctgaccacctaatgatgtcacaaaatttgtttcatttgacaatgatgtgataagatcaagcaccatatcatgaacacgacaagcatgcacccttccatgactgtcgatgtatgctggttgaatcatgcttctatttattagctcattgaagtatttacctccttcatgcaaagtatccatatcttctccaagtataaacccttcagaaatccatctgcgtatcagttgatctttctgtatattgtaatcctctggatatatacttagatataggaagcaagctcttaaatgggctggcaaatcataataactaatagacaatatgtgccgcatattctccacatgatggcttttctcaagtccagaaccaattaaattgtgtaccctatcccattggtataaattttgtggtctcatggccaataaactgcctatggtgattatggctaacgggactccctcacactttcttaaagttttttcagatatatccttcagttccaatggacaaccatcttcacagtagaatatccttttgtagaacaatttctttgagttatcactagaaagtggctgcagcttgtaaacggtatgatcaacctcagaagagcatggcgtggcagcatcaagcactctgcttgttgtgattattctgcttccacggtcattttctattaaagcacactcgatgcattcccatgctgatttctcccatatatcatcaattacaatcaagtacctgtggttttgtgataacattagcacaagacatgagttaaattgaaactgaaaaccaattaattggatcctttcaaaggcaagtaacagatgaagtattcaacagcacaaaaggctctgctctgagaaccacgagtactggcattggacagaaggtgagggagaggaaagacaggatctccagaagctatagtttccctacatgttcagtctcatgagttcagtcccacaagtatagggtttcatgaactcagtttcaatcatgttagatgtgaacattttatttacctaacctttaggtctggctactacttcctgaacttatgtagcatgtatttgctttttcgaagatagggaatgacttctaaataaataaataaaaatttgcagccaatttgatgctgacgcggcccattagcagcctaatggtatcaaacagagtagagtcaataatatttggaccaacatgcaaaaatttcctaggatatgacagggttgcagttttgtgagaagttcaaagaatagaagttgcctgaatccaaattgatcaaactagtaattttgctatcttggttttagttttccgaaagaaaagaactgtattttagacctctaagcttttgcctgtcttatcgaacaccctgaattcacatttctctttcatagccccttgaacttcccgttgttatcacacctagcaccctaagctagaatattactttgccagcccattgaacttggtttattagataaaaggattaatttcattgttaattcacctagcagtctgtgcatgtattttactatccctactagctccaaattctagctgtacttcaagctaaaatgcttacacatagcatgggatgatcctgggagcatatcttatgtacacaagcactcacatgtacataacaactaacaaatatcaccagaaaaatctaagaaaattcatatgtgtacttttaatagtattacatttacgtgtaaagtcccatcttcaaattcattctacagagagcaacaacaagaaacaaaattctgacagaattataaccttaaaactgtcacatttttttggttacggctaaaatataatgaatttgtacttgtaggtgtaatactattgaaagtacatgtatgaaattttctagattttttggtgacatttgttagttggtgtacagtgtgtacacgtgatggcttgtgtacacaggatatgttcccaatgatcttaagcatgtatttggttagttatacctcttttccttaatttcatctctgattttgttgatgatttcctgagcacaccatgtttctgtccaagcataaccttgttcactgaattgacggagtatgctgctcaggaccttctttagatcaggctttaaggatactgaaacaaaagcatgacactcgaattgtcctctaagctgttgataaatgacattagcaagagttgtcttgcctaaaccaccaactccaacgatggagatcactttcagtttattctttgagttgcccttggaatccatcagcagcttggtcaattcttccttaggtccacttatgccaataagtttagtagcctctccatagataccaattaaacggggatcaattgcggtctcagtcttggcagcagcaacaatagtaccaaccttatacctatcacggcgtgcactcgtctcattgacaagcctcctgatacgtttgatgtcggtagcaacacgatagcgaaccattgctcttctcaacaagctcaaacttcccttcatgaatcctttgagttcatgtggcttggctagcaaatgggtttcgacatgaaccatgaaattgtcgatgatatcctccatgtcgtacgactgctctctcacatccctctcccaaatcttaacctggcgatcagttacctgcacctcaaacaacttctcaagggcagcctgaatgctctcaagctcggctttaataaatatgatgtcgcccctcgcactgttctgcagcttgtattggtccatcagcagggtagtcaacttggcaatgagggcagtcatcgcccctgctacaactgccatctttgtcgatcttctttacactcaggtgtaattcaacagtgctgtcaagtagaacaacacagttagccttctttttgataaatgatatctacacatccccatcgactaaacaaacaccacacaccatgcaaaacaaatagaaactaatagcagccccatgctggcatgcccctttcctggtaagcaatggccggaatcgatcaattcaacaagagaaacttagcagcatgatgacctgaacagcgtgaagcatccaaatagtttggtatgagatcaagaagcacatgatggatacctggaacaacgtcctggaactggaagggagctggaactcttcctcctagctggcctgtgtgacaatgtcagtgaagacaccatgtctgacagacttaccttgggcaggcggtttatcaatggactatccacccgttggcttaatttactcctttcatggtcctggttttcaagggatcagtgggttatttggattgttcacacttgcattcatcatactgtcattttctcaaacacgtagagggcatagtagaacaccatattctgttccgctcaaccttatccttgctagccagcaaaccttaaacaagaaagaaaactacaagtcagagtaaactagtgtattattagtcaatgccattactatcaaggggttagtttatcaacaaatgaagtggtcagtcccagtggatcacactcagcttccacgtgtcatccacgcaattttctcaaacatatagagtaacctagtaatttaatccagcaaagtaaacaagaggtgaagagaaccgcaagtcaataatcagagttaaaagtctcgacggcaacaggatagctctgtctgtcttctagaatcagactattgtttattgcagaaatcatcaagaagagaagagtagatgattacttgtaggataaccagcagaattgccctgtgaaccgcgacatctgcaaatccacgcctgtgcaagaagagaagtacaatcagacaattagctagtgaagcaaaaaagaacaaaagaatcaaaggagtagtccaggctcaaggaggggaaagctacggattgagacgggagctagcttgccgccatgtatggccgatggggggtcgccatggaagaaccaagatgcgcctccgacagagcgcgaagcggatcgaggtcgatggctgcgaggctcgagcttggagggcggggggcggacgcggcgtttgcggatcaatggaggtcgatccgggacggcggcgagcatcgttcttggattccgaaggcgacgcgacggcgcgggtcaaggtcggggtcagcgatcttttcgtggtcgggagcctgtgcagagaatggggattcccctgaccggaacgagggtaggagacgacaggacggtcgtgcgctgggagcgacttgcaatgaacggaagtggggcccgtacatcagtgacgactttacctcttccgactgcaataggctgagtttggcgcttacttttcacgcgcacgttttttaaactagtgtttttcaaaataatttctatatgaaagttgctgtaaaaaattatattgattctttttaaaaaaaataaatactaatatttaattaatcatgtgctaatagaccgctctattttgcttgcaggagggattagttctcatcctgtactgccgaataaatctaatactcctccgtcgtaatatatactccctccgtcctataatataaaggattttgattttttgcttacactatttgaccactcgtcttgttccaaaatttgcgtaaatataaaaaacgaaaatttgtacttaaaataatttggataataaagtaagtcacaaataaaataaataataattccaaattttttttaataatatgaatggtcaaacagtgcaagtaaaaagtcaaaatcccttatattatgggacggagggagtagcaatttagaatcggatttgatatatcctaaaactacgaatctggacatgaaactgtccagattcataatcctataatatgtcaaatccgatactagattcctatatattgggacgaaggaagtatgaaatgtgatatattatatactatcaatctaaatataccgctcatattcatgtacagtactaggatataccacatcctatatatatcctatatcctatatgtatgtgaatggttgtccaaatcgtattactaagatatgtcatgtccgtactttattttggaactgagagtatgttattagagaggaaaaaagggctgccacgagctccaatacattatatactcattttatcccaaaatataaaggattttgatcgaataagatatattctggtatgggttgtgtacattcatattacagatatatctcatccggtcaaaatacctactgtgggatggaggaagtatttggatggaggaagtatttgtatgtataagaggtgggctagatattaataatgtagtatatatttctgtataagtaggttattagatgacagtatatgtgtcattttttttagtttgtagttggctatattattaggttgtgttcgattgcgaaggtcccctctgacacggaaaacgaactagctcattggcacatgattaattaagtattagcttaaaagctttaaaaatggattggtaagagcatctccaacatagtggcaatctcactctccaagttaaattttggcaattttgaggaaaaaaaaggggctccaacagacttgctaaacggctggccaagccatctgactggctaaactcctccctacgctggccaactttggctagccagagttgcctttccaaatcgtgggccccacgcatttttccccatctcctcttatattctctctctacactcgcgagcgcgccactggcgccggcgccatccctgttgccgcctgccgccgtcccttccgtcgtccaccgccatctcctccaccgccgccgccacatccccttctccttttgcatcggcctcgggggatctggtggtgccgccgcaccgtcagtcgtcatcactcacagcggcaccgccggtcctccggtccgccgctccgctctctccggtcttcgccacccaccgcctccgccttcccttggccgaaggccaccgaagctgtcgtcgacgccgacttcatcctactccgggccgccgccgcaccaggccgagcgccgcccacgaggccgcctccctccctagcaccaatcgcaggccccggaagctgcctcctcactctgtccccgtccggccgggtcgccaccacgccgtcgccgtcgtcgtgccatggccgcctccgccaaccgtcggcccacatcaactccttccggcgccccctcgctctgtgcctcctccacctcaccgccctccaccgtcgccgcgctgaccgccgccctgatccagccgccatcgccgcgcccatcgccgcctagcgccggctccctcccggagtcggtaggagagaaggagaaaggggaatcaagagtgagaggaggggaagaaaatgagaagaggaaagaaaataaaagaagggaagagagagactgtctccaccgccccaccgttccggtcggcctccgccactcgcactgctaccgccggcgtccatcgtctccaccccccgcgccattgcaatgcagagaaaagaggagaagacgagaaagaagtggatgaaaaagatcacaaagaaaaagtgtgactgacatatgggacccaccgttaaattggagattgaactggagagaccgttggagtgaaactcaattttggctctctaattttttggcaatttgctaaataggatatttggagaggcaaaaatagccatgttgttgtagatgctctaagattgttttaaagcaacttaaaaaataaaaaaaatgcaccatttaatattttggaagcatacgcgcgaaaaacaagtaaggtgagcttgggaaaaggcaccattgaactcaatcttaaacttgctctaatgctttttttttaagttggtaaacgatgatattcgatgggactttggtttccctaagagcctgtttggttggagggactaaaactttagccccttcactttaatcccctttagtccctaaagtcttaaacatggatgactaaaagggattaaaagtgcattagtccattagtccctatgaaaggagcttatagggattaaagttgcttctttctactcactgccccatgcacaatcctctctttacatggtgttaggggttaacatggtctttatatagtgcaattattgacctttagtttttttagtctctacattcaaacaggtatggatttagtcctaggactaattttagtcctacaactaaaggatccaaacaccttctaagcttcaaagagatggacataattagtggtaagtggtaaacatgaatgggttgattgtgaaatggcagcgctgtagctgaagccacggagatggaggaccatgttagtccggtgtcggaggcgaaggcaagggaaatgagaggggtcaaaggtgatgatggtgtcggtgtcggtgatgatggtgtctccagcgctacggaagttattagagattgggaaaacaacatggcaacaagcttgaggaggaagaggagaggggagggggaagtgtccggtgtggcaggcctggcctaagccaggggaagcgtgctagggtgttgaggcgatggcaacagtggctagatgtgatgttaaaaaatactgtctattccaaattataagcgctatatttttatgtggtcttcaataatatataatatattttgaccagtattttatttcattctataatcccaacaaatataaaattagcatcacatgaaattacttcaaaatatgaatataatgatataacatgcattatacttagtatatatataggtagtatggttattagtcaaaagataccaaatttgattttccttaaaaagggggcgccctataatttgggacggagccacaggtggagtaataaagctcttgatcttgtttagggcccctttaatttggaggaaaaacatgggaattttttagtatttcaatcctataggaaaatttcctatgaagccctttgaaacaaaagattgaatcatatctaatcctttgaaatttctatggaatgaacaatcctatagggattttggagaaaatttagcaagagcttcaacctcttggtaactttcttttgagtctatatctctcatccaatccaattactgcggttcaatcgaacggtcattcctgtgttttgtcctgcgttttgtaatcctctgttttacactacgattaaaatcctacgttttcctattcctacgttttctcaatcctacgattcaaatgagcccttacgtgcaaatcatgggttcaccttcccattgagtgtctgtttatactctactccctctgtttcaaaataaataaaagagggctgctacaaaacgggatcacgttgcaacgggatagatatattaactattctcttgcacgagtatcacaggtatcaggtcctaggtatcacaggtactgggtaacaggtatcacaagtatcgagtaccatgcaactgataccacaacaggtatcaggtatcaagtaatgtctcatagaagggtatcctgttccaacaggataccgttgtctaagttttctgtaaatcaaattataggtttaaattattatattccaaaataaaccaacttctatctactccctccgtcccaaaaaaagacaaaccctgggtttccgtgtccaacttttgaccgtccatcttatttgaaaaaattatgaaaaaaattaaaaagataagtcatacataaagtattaatcatgttttatcacataacatcaataaaaatactgattataaaaaaatttcatataaaacagacagtcaaacgttggacacggaaacccagggtttatcttttttgggacggagggagtactaacctaccatcggttcgcaaatcaagaaaaattttatcttttaaatacccctcacatacccatcaatacaacttttttattaattagggatagtttggtcgtttgtcttcctccttaattttaccttgggaagctagggtttgaaattttatggatagagggagtaacaattacaccacttttagatgacatgcatggaacatatacatgggcaggtgtgatgtgttcgaccatatagagccctaaattttagggtttaatccattttaatacattttactatgttttaacattctcatgttgttttgtagatttcacatcctcctccaatgatctagctagaacgagcttgttactgttgtctttgataagtgttcgatgatcattaaagccacctcaaatgcccatagcccacgacgacaatgtaaacacatgttcagtgaagatttcatttttatacttcgtaaagaaaacattgtcaagccacctcaaatgcccatagcccattctaagtttgaacaaattataatcattgacggttggtaagcttcctcggtcaaccatctatacatatattgtgttctactactactatataaccccagtagtcattagtcatgcactattttattttaacgagtacattgtacttatggataattcttctaatatggatggatagaagatgcataaacaggagtggatacttctaaaattataaaatacgtgacattaagttgaaaagtggcttaatggtgcgttttatactacatactcctaacttttacttccttatatttcacgtgcatactttttaactgctaaattatatttttttaaaaaaaagttatataaaaagttgattttaaatatcgtattaatttattttaaattctttaactaatccttaattaattatgctccaattcatcgctccattttacgtgttcctaacctcaaaacaacacagcctaaagcctaggtctatttgtacgtaacgttagtctatatacacaatacaaattaaaatttactcctttgtttgacgatatcttttcgttatggatttagtacccgggccgccaatttacagtgcacataagcttgtagccaacaaccgaccgtgctatttcacattccctaacgtaggagtgtcttttactcccctgttctaaaatataataatttttagtcttaatatttgttccaaactattgttataaaagttagtcgatatagcggaacaacgactaaccatcccgatcgtttcagtcatatgatcacccaaggcatccagatgacgacataagaacacacgatatttgttaacgaggttcagccgaagcctacatccccggggctctgattatggccgctcctcccaaccaacatagctcctagctgctacgagtccatggcctcgccgtcatcatctccctacgtgtctacgctacattgtagtcgccatggttagattatggtgccccccctccatttaagagagatttgggttacagagtccgactctaactccaccccctaccacctattacaacttcaagtccaactgtaactaaataggactagtatattcggcacatattcaaacaaatataacaacctctccatctacattctcttatcaaccaatcacaacattaagctattcaaattccttacctacctgctcttctcaaccaatcacaatcttctcctatttaattccaccaattttcttaatactcatacgtgttcaattctaaaactccttattatacttttggacatccgtagcacttcataaaatcttactacctgcattatgggcatgtttaggggagcttctagctgctgcagttgtagagtacagaaaatgaactagaagccataagctcgaaaacccagctttttcagattcttaaaagctggctaccaaccacctgtttctcagaattttaaactccccaaataggccctataggtactatagcaatgagccaatgagcgtttatttgtgagttgatagagataagtggtgatgccttataggcgatattctacccctctgaatcttgtccctagaagtgctttgcactttttgtacttcctacgtcttagagaaaacaaaactagtactaactgtactaactgtgacactagtatcatgaatctagacaaaggccatgtttggaagattagcccagggctaattttaagagctaatgtttagtcatgaattagtaggctaaacattagcctagaatggcatgtttggatccatgggctaatttaaggctaaaagatggagagagaggagagagaaggtgagagagggctgctttttaatggtccccacacaaaattagccccattagagcatctccaacagcctctccaaatcgaactctccaaacacccgcatagccaactctctatctgatttggctagtcaaactagttgttcacttcaacagcctctccatctaccctctctattacaagtctattacaaatgggacccacatgtcagtctctattactattcttcctcctcttccaacccattctctagtactacttcctccctccagctgtactgcatcctctccggcggagaacaacgagcggcgacggcgccgagcctcaggggcgacgacgccgagcctcaggggccgcggcgggcagcgtcgtgcggaggccggcggccgcagcgggcggaggcggcgggcatggtgctgcacggagccgcgcggaggccggccgccgcggcacgcagaggtggcgggcggcggcgccgcgcggaggccgggggccacggagggcggaggcggcgggcggcggcgccgcgcggaggccggcggccgcggcgagccgaggcggcgcgcggcgccgcgcggggcggcgggcggcaccggaaccgcgcggagaccggcggccgcgtcgagcggaggcggcgggtggcgccgccgcgcggaggcggcgagcggaggcggctggcgggccatgcggtggcgatcgaaggccggcggtcgccgtgctcgtcctctgttcgtgctcctcccgtgcctctccctggttgcccgtgtggggatggagctatggaagagtttggctgtgtgggacccaccattggccagccaaatagagtggctaaatttggctagtggagagagggttttggccagccggatggcttagccatccggttggagaggctgttggagtaccctttttggctagaatggctagaatttggctgagagtgggatagagaggctgttggatatgctcttagcacctcttgaaggggctaattcacattagctcaaaattagcctacttgtttggatccttgagggctaatttgaggctaaaggtgagggctaaacattagcccatggaactaaacagggccaaagatatgtctagattcatagtaagggtgcaagcggctatctgtgaaaactcacttataggctaaactaacacgtgaactcgcttattttaagctataagtgggttcacaggtgacctacttgcacttataatttatagtattatgatgtgtcagattttatatgaaagagatgaagtagcgtctgtgacagtactttctgtacccgacagtgttcttttcacggtacgagaaagagaaaaatcgttggtgcgtcctaggtattgtaggagcagcacgattactaatcttgactgttgaatttggtacagatcattgtcataacataacaaagcagatacttccaagaatactcactgtcaccgcacgctgatgcgacgcgatcaaatcaaatcatccatcaagctgtagcgacacggctccctgtccgcattgcacacggctttggtcgctgccacacctcccattccttagccaaacactcgcactactctcacaagcagcacgcatcgctcgctgtaggtgtgctcatggagaacggcggcggcgacgcgtcggcggcggcgtggcggttcggggcggcgaacccggcgatggaggcggcgaggtcgcagagcatccgcgcgctggtgtaccgggtgtacgcctgcctcgacaggggcgacgcgcggtccgtggcgccgctcggacacggcgaccccgccgcgttcgcgtgcttccgcgcggcgccggcggccacgggcgccgtcgtcgccgccgccgcctccggcgcgcacaacagctacgcgccggccgccggaatcgcggaggcgtgcaggtacattgttttccttatccgtttactcaggtagtgtactttttgctgccgttgcttactgtcatttactcttgggctggattagaaggctcgggacgaaagaagtccaggcccaagttacatacatgggcccaagctaccaagtactatagctagctacgctgcttctggcctttggacctagcaaatatcactctcagtactatcattgtcgtgaggaataagttcaccggaggtccctccacttaacagcgagatttttgaggtcccttaaccacaaaaccagaaatctccacccctaaactatacaaaaccgttcactcaaggtccctaagcagtatatatgggtggtttcgctgacgtggcatcctagtcagcaaataaatttttaaaaagtatgtggagcctacatgtcagctgtacatttttttcttctctttttctttttcttctcttctcttttctctcctctctccttttcttcagcgagggaggcggcggcaggcggagcagtggagggcgagcgcggcagcggagtggaggcgggcgcgagcgcggccgcgggcagagaagtgggcagcggggcgtgtcacgtcgctggacgtgtccatgagccgcctcgccggtgagctctcaccggccgtcgccaacctcacgtagctcgagctactcatcaacctcacctccaacgccttctccgggagcatcgccgatggcctcggctggctccggcggatgtggtatctcagtgtcacgcccagaaatttaacccaaattttcagactatttttcgtattaaatccctgtccaggaccagccagggtacacaaaacgacaagtaatatacagttctaaatgtaaataaagcgtaaaatacttacggaagaggcacttagtcctcacaccgaaacagaacgacagcagcggaaaaaggcgatcctagcggggcttcagctccactccacaggcaaaactcaactggggtctgagacttggtcctctaactccatcttcagctcagaaacacaacacttctgaaaagggagaataaaagcaagactgagtataaccaccgtactcagcaagccacactaacgatgcagatgtgcaaggggatacaaggatggtttgtggctatttgcataaaggcggttgtaaaacattttattgagcaaaacagtaaaactgttgagtaattaaagtaacattaaatctccactgatcaacgctacaccacgttgaacaggcccaaccaacccacctgaactacagtgtattgggtcgatttattaagatgggactaatcacggtgaatctggtcgaccgcccataaccgcgggcacggctattcgaataactttactctgatcagaggtgtacaactgtacccacatgacacagccccacgacacgtttccgtgcgccgacatgccaccacgacataccggaaagaggccgtgacaggacccttcgcataacccactctagccaagcacaccacacctcaggtttcacccccatccccatcgggcaacgggcagtcccctctcgtgcctaggtgaatccggaagcgacagaggccgtcgcagggcccgccccgctccatcacgcccacccttgcctggatgcgtcgactagaggaaagctacactacaagcccagccgttgcccagccgtccttaactgccatgggtgcgaccagcaaaaccatgcacccacagcccaccattcagtcgcattttagttggataattacgaccatgaagcatggccagatgtctcgagcacgcagctcattctgatactaaaaggtctaatacggtaattatcccatcaactgagctagtggtaattaagcatggctaagcatatagttctagctaggtcacataagtaacatgagctagtcgatttattacccaatgttgacaaaggacatatatcaagtaaatatggcacaagcgagcagataggtaaaaccctgaccccatgtaattagcaaaatatgcatatttatttgcaaacagtaaaacatttataaattggaatcaacatgctcaaggggaatgtgtgacttgccttgcttcttcaaacaatcttccgaactcttatccttgcgaccgtgatcttccgaaatgacggattctacacgcaggcacgcaaaacgaggaaaaactctaataaaaaccaaggaaacagtacataaaaagtaaacaaacatgtagagctcaattttagatgaattttgcaagttgaatggctcaattcggagtttgaatgaattagatatgaattttagaagttttgagccatttaaatgaatttctagaattattaacgaattattgtgcaattgttaattattttatcaaaggaaaaggctcctgctggcgtcatcaaagggcagcggcgccgacaagcgggccccacatgacagcgggcaagggagtggtccaccgtgaactgggaccacggggtggtccactgccggtccacgggaaccgacggcccagatcagcccgagctgatcgggcggccacggggtggcgcggctgagcacgggcacagcttaggccggcccggccgagcaacggctcacggcggcgcggcctcctgcggcgacggccgacgcacgcgggaaagcggcggcgcggcgcggcaaggggatccgggcggcctaggcgagcggggcggcgacaagccggccggccgacctaacggcggcgacgcacggcccggtggtcgccggcggcggccaccggcgcggcagcacgcacgggagacagaggagggaggcaaggagggagaggaggagctcaccaaggacgcgacgacgaggggcggggaaaagcgggggagctcggcgtcggcgctcctcgggacgaaggcggaacggcggcccggcggcgtagggtggaggtggcttgggatgcactgtggaagggtggttgcggcgattaaatagggaaacggagcggaggccggggtgcggcgaggcacggagaagccggcggcgcaaacggcgcggcgcggcagtggctagggcggcggctagaggtggccggagcacgccggggaccgatggagagagggagcacggtggagaggtggttcgcgtggtggaaggggaggaagaaacggcggctgagcgtgcccttgaggtggcaaagccagcgctggcggcggagcagtgcggcggcgaccctagcgacgggaaacggcggccggagttcgccggagtgtggcggcgcgcgggagcggcgtggggagagcgagggagagagtgccgggcccgggaaacaaggggaaatggacgaggggagcacgggggtgctttttgtgggctcaggaaggcgggatcgaggccggacgtggcggaatcggccggcgaagtggggcgccgacgtggagtggtggaggggttaaccggcgccgattttcgcggggagagtggggggaaaggtggaggaggtggaggggatcgatttcacgcgctcgtggggcggggtggagcgcgggagccgcggcgtcgtggggtgaaaccggcggccatggcggcagttggggcgacgggaggttggggaagaagatgacaggtggggcctcgggtcccacctgttggggagagagagatgggaaaacgggtgagggaggtaaagcagacttcagggagagagagccgagcgggccgagggaggaggccggcccgagagggagagaaaaggggcgcgcgggccgcgggagagaaggaagagttgggccgaaaatggcccaaagagaggaagggggattttaattgtttttctttttatttagttggttaaaatgaacttggtgcttttaaaattatttcttgagctccgaaaactcacggaaaattctagagagtacattagggcacaaagaatattacagaatattcccggccaatgatttttaaaggaaattttaattccctccataattccacttgattaaattggtttaacttttatttaatttctagaaaatgcattattaaatgattttttaaacccgaacgaaaatcgaggcgttacactcagcctatgcgacaacgcgttcgccggcgagatacctgacgcgctccacaattgcaccgccctcgacgtcgcgtacctcaaaaacaacaacctcgatcgtcggcggcattccacggtggcttgacgcgttgccgaatctcacggtgctccagctcagccacaactcgctctccggccacttcccgccatcgctggcgaacctcacgaagatcgtgcagctcgagttcgaccagaaccttctgggaagttccatccccgacggcttgtcacacctcccggcgctccgcatgttagccttgtcgcagaacagcctcaccggagagatcccgccgagtttcttcaacatgacgtcgttgcaaggtctcgcactcgcgaacaacgtgttctgtggggagctcccagccgatcgacgtgggcgcacgtggaccagcacattcctcccaagttctaaacgcagttcaaaccatacaagtgtaaaacttcatcaccgaattcgcatttctatctactccacgattcgaacgtcaactagcgatagcactttagtctgtaccacgagttctgttgaaattataagcacataataatttaatttattctataaataaatcatgacattgcagatgtaaactagattgaacgcatcattagatctacacatgtaaattaagcagtaaaacatgaacagatcaaatatgcgcaatatgttgaacacgtaccgaggtgacggaaagaccggttgctcggcaggaactactcgcggttgcgagcgtcgacgaaggcgcgaagcatgcgagcgaagaggaaggcgagccgtcgcgaacgaacagggagcagtcgcgcgaagcgcttcccaaaaaccttattgccgccttctcccggtgcaggacgtcgaaggcagaggttccggagactgcaagagtgtaatcccattctcacctctaattagcttaatgtttaagataacatcagctactcccaaatccttcatatcaaaattttgagacaagaatgatttaacctcatttatcacctcaaggtttgttccaaatatcagtatgtcgtcaacatacaagcacaaaataactccctcacccccaccatggcgatagtacacacatttatctgcctcattgactgcaaagcctgcagatgtcaatgttttgtcaaatttctcatgccattgcttaggagcttgtttcagaccatacaaagacttcaacaatttgcacactttgccttcttgaccttcaactacaaacccatcagattgatccatatagatctcctcatccagctctccattaagaaaagctgtcttaacgtccatttgatgaacgagaagtccatttgatgaacgagaagaccatgtgaggctgctagggaaagtagcacacgaattgtggtcaatctagcaacaggtgagtaagtgtcaaagaaatcttcgccttctttttgagtatagcccttagcaacaagccgagccttatacttttcaatagtaccgtcaagcctaagcttcttcttgaacacccacttgcaccccacaggtttacacctatagggtcgctctgtcacctcccaagtcccgttagcgataatggaatccatttcactatggacagcctccttcgagtagtctgcatcaggagatgcatatgcttctgaaattgacttaggagtgtcatccacgaggtacacagtgaaatcatcaccaaatgacttagccgtcctttgtctcttactccttcgaggagcttcactgacatcctcctcagagacatgttcatgtgtatgttcagtttgttctggtggtgtgattgaactgggaattatttcagagggttgcctcgaaccactatgtgtatccttcattgggaaaaagctctcaaagaaggtagcatcacgagactccataattgtaccaacatgcatgtccggtacctcggatttaactattaaaaatctataggcaatgctatgatgagcatatcccagaaagacacagtccacaatcttaggtccaagtttgcacttcttcgttattagtacattgactttcgccaagcacccccatgtacgcaaataagaaagtgatggttttctcccaatccatatctcatatggtgttttgtccttatttctgttaggaactctgtttaacacatgatttgaggtcaacaatgcctccctccaccatgccttaggtagtcccgcggtgtccaacatggcattcaccaagtcagtcagtgtgcggttcttcttttcagcaatcccattagactcgggagaatagggaggcgtcctctcatgtatgatgccatgttcctcacaaaataagtcaaactcattcgagaaaaactctccaccacgatcagacctaagcctttttatctttctgtcaagttgattttcaacttctgccttataaattttaaaatagtctagagcctcgtctttcgttttcaacaagtacacatagcaaaatctagtagcatcatcaatcaacgtcatgaaatatcgtttttcacccttcgtcaacaccccattcatttcacaaagatctgaatgtaggagttctattggtgccaagtttctctcctcggcagccttgtgaggcttgcgaggttgcttcgattgcacacacctatggcacttagaacctttgacaatggaaaacttaggaattaaacacatgctggaaagccgagacatcaagccaaaattaatatgacataaacgtgagtgccaaacattagcctcatcatccacactgccacaaatatggttcacagacttattgcagaaatcagaaagggaaaagcggaacaggcctccacactcataacctttaccattaaaatatccatgtttagacacgactactttattagactcaaaaaccaacttaaatttgtctctagttagacgggagccactaacaagattcctgtcgatagaagggacatgctgcacgttcttcagctgcacgatctttcccgaagtaaacttcagatctaccgtgccaacaccatgaacagaagcatgtgacccattccccattaggacggtggaaccccgtgcgacctaataagaagaaaacaatgagatgtcagcacaaacatgtacattggccccagtatcaacccaccaattagtagactgattaactgaaaaaacagtaggtaaattaccatacccgctcccatctccagtgttgccaatggtcacattagcagacttagaagtctgccctgcaggtgccttcatccccttgcactgtggacacttcctagccagatgaccaggttgcccacacacaaagcaagtcctctcatcctggttaggattgttgttcttcttctgcttcttgaagttggtggtctgttgagctttgtatttccccttgctcttgttctgggccttatgcacaacattggcactagactgcccaccatcgcccttagacgcggcgtctttttcccgagctttctcctcaacatcaagagacgctatcaacccctcaacggagtattcctatctcttgtgtttgagtgcagtaccgaaacttctccatgatggaggtagtttcgcaataatgcacccagccacaaatttgtcgggtaagacacacttaaggagttcaagttccttagccatggtttgtatctcatgagcctgttcaactacagaacggttgtcagccatcttgtagtcatgaaactgctccatgatatacagatcattgctagcatcagtagcaccgaatttagtattcagtgcatcccacaactccttagcgtcggtcatatgcatatacacctcgaccagacgatcgtcaagaacgctaagaatgcatcccacaaagagtggcttcctcgaattgcttctgctgatcagcagtaagaattccttcaggtttgccaatactcacccagaagcatttcatagccgtcagccacagagtgaccctgatctaccatctcttaaagtgcacaccggtgaatttatccggcctcagtgcatcggcaaaaccagccatagtaaaatcacagcgcctataataaggtttttggattgttgaaattataagcacataatgatttaatttattccataaataaatcatgacattgcagatgtaaactagattgaacgcatcattagatctacacatgtaaactaagcagtaaaacctgaacagatcaaatatgcgcaacatgttgaacacataccgaggtggcggaaagaccggttgctcggcaggaactactcgcagttgcgagcgtctacgaaggcgcgaagcacgcgagcgaagaggaagacgagccgtcgcgaacgaacagggagcagtcgcgcgaagcgcttcccaaaaaccttattgctaccttctcccggtgcaggacatcgaaggcagaggttccggagacctgctctcccgattgccggtgcacgccggcgagcgggatggagtagtctacgagcgacggcgcagtacagagtaggaggcaaaccctagattgatttcgcgtgtgttgcgtgaaggcagcggctcggtttatatagagatagatcgcctgatcagggcgtccgcgtaaaccgaaccggataagtcacgcgtaacctatccggattccatgccgttttcacacaccggattttttggaatgtttccaaaacaaaacaaatccgaatcccgcagcaaaacaaaactgcaaaaggaggctgcatctgcacaagggtgaggagccaattttgcggaccattcgacgcgtacgtcgtgcacgtgcgccgcctgccctgccaggccaggccagcgagcgcgcgcgtgtgtttcccctcttctctccaccacacatgctttaagtggctaggagggcatcctcccttttaaggaggtccccctctcctagaataagcaaggtggtactaaactccacatgcatgccatcccatgaggtgggcttttgtgattttccaaagaattaatcttcgaatgagccttagcccatctattaattccaacaagttcacgactcgacacctccaggctctatccctaacccgagtaacaaccaaaggaacccaccaaaccaagacatctcgagcgattcccacacggatctgcgagggctagcgaatctatcgacactacataaatcagagtaagtccaaagaagcactttgcggcggaggtgctccttggggatgccggagaccatgcttatctcgcctggcttgatcttgacgagggcgtcggacgttgccgcggagagcatccgcgcgggcgtgggagacgatgagaggagcccccgccccagggaggggaggcttcacaggagcggggcgtccatctcgtcggagccgtacgccgaccgatgatggcggcgcctgggagttcttggacaacctgaccaactgcaacaccttggctgagatattcctcaacggcaacatgttcgccgacgtgatgttgagctccgtcgtggttccatccgccattggccgattggcgacctcacgcagctactcaagctcgacctgagtggcaactcgcagctcgctccgcgccgctcgccgcctaccgcgcccgctccgggcccgcctcctctcctcttctcctgcttctttcccacgccccgccacgcccgcaccgccgccggtcgccgcacccgcatctgcccgcctctccaaagaagagaagagaaaagagaatatgcagctgacatgtgggcccaagtacttttaaaaaaaaattgctgactaggatgccacgttagtaaaaccgggcaaaaatactgccgagggacctccgatgaacggttttgtatagtttaggggtgaagatttctggttttgtggttaaggggccttaaaaaatctcgctgttaaattaagggacctccagtgaacttattccttgtcgttatatccggtttgcaccggttttaaaagttagaatagtcgttatatctggttttttggagttggagtccagccaaacagtttcatctccacccaaaataaaagtatagttggttgaagtgctcttgcaaaataaattaaagaagtggagttgtgtttaggttgcttcataactccactttattctcagctcttgagttaaatccaggaattggagccttactaaacaccatctaagatataaaccagatcaaaaatatacagatcaaaaatatatttaaggaagttaaaagttgactattttcacaaaaatggtacatagcaaccaagcaagaaccagtagcaaagtatcgtatcaccttattaatttgttggcaaattttgctacagtacatcgtgactttgtggttttagctataggacaacgcgcgaagtgacttttgggggagcactctcaaaagttggatatttaccggtggacactgcacctattaaaataataatttcccgttaaagagtagagggaaatcgcgtgaaagttctgaaatgctcttgggcccgcatgtcagatttgtaatctctctatatcatctctttctcaagcacacgaggcctcgttttccccttcttcttcctcttctcatgcgcgtgtgcttgagaaagagatagaggcacatgagaaagagatagagatagagagattacagatctgacatatgggcccaagggcatttcagagttttcacgtgatttctctcttctcttaaactaaaaattattattttaatgggtgcggtgtctaccagcgaatatctaacttttaagagtatcttccccaaagtcactccgcgtggtgccctatagctaaaaccataaagtcacgatgacctatagcataatttatctaatttgttagtacactactacacgattgattttcctggacgcccccccttttttttccatgcggtctgtaagtggaaccacacggaaaaatagggaaccggcgctggggtgtcgtccgcatgggaaaaatcgattttcccgtgcggacgtcctatcccaaccgcacgggatattcctccctcctttccctctcacccacttcaattttttcctatctctctcctcctttttcccttttattctccctcaaccactcccacctaaccggctctctaccttatctcttctcaaccggctcccacctctctctctctaccttatctcttctcaacctcttctcaacccctcaaccggtcggcttcccaccctcctccccggccagattcccctcctcctccccctcccctgggcgaggcgggggccgggcgcgacggcggcggctgggcgaggcagccgggccaaggtggcggctaggcgaggcggtggcctgggcgcggcggcatcctgggcgagacggctgccgagcgtaacagcggcggccaggccgaggcggcggcggccgggcgcggcggcggcctggggctcctcaacgctcccaccccgctcgtcgccaactacgttctccaccaagccgcggccaccaccaccatcagacgctccaccggctcggtggcgtctttcctgtcggtggcgtctttcctgtccggcatggccacgctcggtgccaagctagtcacggtggtcgaggaggaaggcgaagcggaggaggacgacggcaactcggccggcaacgccggggtggccgggcgcggcggggagcggcgaggcggtggcgctcgagcgatttttcctttttttatttttggtttttttggagcgaggcggtggcgctcgagcgatttttccttttgttttttatttttggtttttttggtccgtgcgggcagtataacacaaccgtatgggataatcgattatcccgtgcggtcgacccacccgcacgcgaaaatattaattttcgcagacagccggctacagggtgccggataaccgcacagagaaatcaaaatgcctgtatggaaaaatcttttctgtactagtggtacgaactaaaactgtttagaagtcgaactcgaaaattttacgcgtaacgaatacgaaagcaagaccgttgtattggagtcgtgtttcagtaaaatttgcttggataatgagcattacatttccccttccctatcactgaagcacttagttcaaatggttggtttgccatgctcttgctcggttgccacttaacaattcttatccctgcaaatacttggtttaaattgttggtttgccatgctcttgttaattaacacatagccatgcttctatcaaattgttggtttgttgtgccctttttaatctacggttttatttggaataggttaagattctaagatgtagttggttggtagcaatacagtttctgatttctagtttattttttatataactatagattcttagagattgggtaagaatctaggttgtttggagaaccagatattctaagagaaattgcatatcactgcttctattatcagatttgataagttaccactggaacttgctaaaacggaaggttccagtgcttagttcgtactaccactcaatgttgattaacattgagtgaaacgaatctccgaaaatcactgtaacaaaaatataataaattataccttccatcacaggaagaattaaatcctcgctatgaacctgaacaaatacttatccagtttcataaccaggatttgaatttattttatttgttttatggagggagtaggtgataaaaatgtgtggagaaaaataacgcactaatagttaggttggttaatgacagttcgttctaaaaggtgttataagatagcaacttaggccaatcccaatagtagtttcatacaggagttctattctcaataaatagcatactccttccgtttcaggttacaatacgttttgactttggtcaaagttaaactattttaaatttgactaagtttgcagacaaatatagtaatattaataatactaaattagtttcgtcaaatcaataattaaatatattttcataataaatttgtcttgagttgaaaatgttattactttttcctataaacttgatcaaagtttaagcagtttgactttgatcaaagttaaaacgtcttataacttgaaacggagggagtaccatattagcagatttggtgacatgacaatataattataaagagagataaaaagtttaatctcatccaatcccatgtattgctattaaatgttatgatgaacctacgaaattgcaaaatgaaattctatgttagagatcttatttcattcatcaattcaaatctcattagatgacatgacactcttggtaaccgtgaaatgaaactctccacttcccttaaaatgacattattgtaatgcaggtcgatacgttcgtatcgtcttaattttcttgtttcttttctctatgcacgtgtttagacgtagaggctaaatgtaattttagaatacattacctttaaaaaatacacattgcttgtgttaatggcacgttggcacacatgacacgtcaatctgaagcatcatggtcataccagcactcggagcattgcccatgtaaattttgtgctgaagaatatgctctaacaccataagttaatcatagaatcagttaattgacaagtagtgtattattaaattgatcaaggacatgatcgcccccaacaagattgatcatctcgagatccttaaaaaattccagcaatatgggtcaaatttgatccctacttacaaaaactacaaagaattgaaacagattgtgacacgcgctgtacgcacaccaccctcttctggtcttctcccctgctctgctccaccaccatggagagcggcggcgccggcggcgaaggcgagacggcggggtggcggttcggcgcggcgaacccggcgctggcggtggcggggtcgcagagcatccgcgcggccgtgacacggatttaccgctgcctcgacgggagcggcgacgcgcggcccgtggcgccactcgcccacggcgacccctccgcgttcgcgtgcttccgcgccgcgcccgccgccacggacgccgtcgccgccgctgccgcctccggcaagtacaactactactcccccgccgtaggaatcgccccggcgtgcaggtacgtcgtcgcgtgcaaaagtggatgacagatcatacgtttttcttggatgaaatatcgtgtgaaaaatgtgaatacgcgtggtgaattttggccaaatattcaaatttatatatataaattagcacacactttagcatagggtacattgtacatatatttttacagaatttcaaggccgaactcaattaatcacatgaaaaaaaaagagaaatagctaaattttatgacagaggagtagacactagctagctacataattaatgtttgatttaatttattatagaaaaaatcgcatatcatataattttatatacgataatatttcttcaatgaaatcaatcttttctatggttttcatcagaagataatattttagactaaagaagtcactactcaatcagcctgattttaggagtgtattttattctctaaataaaaacattccaacaactcaaactacctctctatacctatctttctatctcctcttgaatcattccaactggaacatgaagtgctaattatcctccatgtgcaaataagtactttctctatttcacattgtaagccattttagttttaaatacaatcatccatggatctatttatgtgcttcagatatatttctaagggcctgttcactttgatgccattttcaaccttaccaaattttgatgaagttgtcaaaaaaaatagctacatttagtttgctgccaaattttggtaactatataagaaattcttaccaaaattttgtcaactataccaaaattttggcattaatttggtaaggttttttttggcatcaaagtaaacaggccctaaattcatatgaatgttagtttagacaaaaaaaaaagagaggctaaaacgtcttataatatgaaataaatagagtatcttcaattaaggcctagttcaaatgtgaggttcaacttagctttatgacgacgcacaaaacaagataaacttttgatgcatgattaattgagtattaactattacaaacttaaaaatatgtttatttgatttttctaaaaagaaacatcaatataaaaagttttcgaaaaacgtatagaataaaagaaagcaccaaacaatgaagttgtataagcgaaatgtagggaatataaaagcaccctaagacaagaacaaagctctgacacaaatcgttttcttatagagcgctataagaaaactgaatgctgaagtggatgagagaggagaggagagagatgagaagcgggctgtaattttacagccagcttaggcaaaggaaccaataaaatatgtgggaaagataggtgggccatatatttatagtgaaaagttaatcactatatgagtaagctgagagataaactataaatatctatatagtaagtagttggctatattattatttttaaaacagtgatgtacaggcacctgcgttcggcagccggtaatagagagaagatttctcttgtttaccgcgtgcacacttcccgaactactaaacggtgtgttttttataaaaattttctctaggaaagttgctttaaataaacacattaatctatttttgaaatctaaaataattaatactcaattaatcatacagtatctttctaatattctctaccccttctcaaactgtctacactgttcggcgctgcttgttcccatcctctattttttttccacgcgcatgcttcttaaattattaaatggtgtaattttttaaaaaaaattctataggaaagtcgcttttaaaaagcatactaacccattttttaatatttttttagctaatacttaatttatcgtgcacaaatccattgcgctgttttctgtgcgggaggtgagggtttccaacgctcacccaagaacacagctgcagagtagtaacatagccctgtggacaacctagaaaatgctcaactacaaatagtactatcaaatcaatatgcggacaaaaaataacataaataagactcttcaattatttcccattgaccagccactggcaataaaagatatagggcgtggtgactagtgatcgatcagtcggtaattaactaatgagattccaatcaatcagtccagaaatagtagtatttcagtgtcaagactccagagatgctagcttctgatttgatttccgatctgagcgatgatgcgatgccgacttcatgccaccccactaattttcagataaccatgtgcggattgaggggattttgagattttctttttagactggcatcgtaacaaaggcatctgaaattcatgatttttaagaatttttccaggtcaccttccaatttcagaagtaatagaatatatttcggtaggaattagcactttgtctacatactataaggtgattttcaaacgcataaatctcatactaatagaatatatttcatgaattagtaccgacggttatgggctcaattttgtggctgccttgaaaaggagaaatatccgttacctgcatctcatattataagggcaaatatttgtttgttttttgagtttcggttcaagaaattctttcgtgacaggaagagatgaaattggtttgaactctaaagagaagtcgatatcgtcctcatggctagctttgattgaatatgtgcagcgcggtggcggcgcacctgtcgcgggagctcccctacgccgtctcgccggcggacgtggtgctcaccgccggctgcaaccacgccgtcgagatcatgatgtccgtgctcgcgtcgccgggcgccaacgtgctgctcccgcggcccggctacccgctgtacgcgtcgcgcgccgccctgagcggcctcgagttccgccacttcgacctcctccccgacagcgagtgggaggtcgacctcgccggcgtcgaggccctcgccgacgccaacaccgtcgccatggtcatcgtcaaccccaacaacccctgcggctgcgtctactcccgcgaccacctcgccaaggttttgattgattaatacatctgatcaaatcaattcggatcggcgatgatgacaaatcgtaatacataaccggattaatatctgtacgtactagatcgcagagacggcgaggaagctggggataatggtgatcagcgacgaggtgtacgaccacttcgcgttcgggagcaagccgttcgtgccgatgggggtgttcggcgacgtggcgccggtgatgacgctgggcggcatctccaagcggtggatggtgcccggctggcgcctcggctggatcgccgccaccgatcccaacggaatcctcaggaacaagaaggtgcttaatttgcttgctgtctaaatttctcaattagccagaatcatggttttaagggcctgttaattggatggttgcctcctcttgccgcacttcaagttaggcgtgccacagatagttagcccactgtttgtttgtttattgcacctgagactaccgcacaaaattcaacagcgatgaactactctaccgcatgtttcttcattgaatgtgtggcgcttaaatcgtccgccacacttgttaagttgagggcgcttaaataaccaaccaaacatgccctaaatccctggttataactgtttgagaaggatctactccctccgtttcagattataagacgatttgactttggtcaaagttaaactatttaaagtttgactaaacttatagacaaatatagtaatatttataataccaaattagtttcattaaatcaataattgaatatattttcataataaatttatcttgggctaaaaatgttattatttttttcttcaaacttagtcacacttaaagcagtttgactttgaccaaaatcaaaacgtcttataacctaaaacggagggagtagctatttactctcatatacaatttagctactatagcctcatttagtccactattgtttgggagagcttttggcagctacagcttctcctaaaatctctagctaccagaagctcctaaaaaatacatatttttactcagattctgatcgagaagctatagttaaagaatccagaagctaggagcttcttcagattctcactagttgctccccccccccccccaacccacaaatagaacctacctatagctgcttgagaagttcaaccactaaatatcttagcccgctatttaaaacactgaccaaaatgcaattgatttgaaaaacttgatcaactacctcatggatcatttctctgtctccacagatcatcgactcagtcattgactaccgagccatctcggtagatcccgtaacatttgttcaggtcagtacacatccaaattcagttgtcgcgcatcttcgcttctctgaagatcaattaattagctgtgacgatgacgccatggaaatgatcgatcgagcagggagcattgcccgacatcctcgcgaagacggacgatgcgttcttcaccaatgcccttggggtggtgaagaaggcggcggagatatgctacgagaagctcaaggagatcgactgcatcacctgccctcacaagccggagggctccatgttcgtcatggcgaagctggacctgtcttccctagatggcatagaggacgacgtcgacttctgcagcaagctggccaaggaggaatccgtggtcatctgcccaggtaattacagtaattagaacatcagtttaatttactggttttggtaaattatggatatgtttctgtagatcatctgatggttgtgtttctgtcactgaacgcatttcagtgtcaggaatgacctgaccattttactctgtctgaattttgccgcgactagtatgtattttcagataatggaagatgaataaaacagtgtaaatgtaattcactgcagggagtggattagggatgaagaattggctccggataaccttcgcggttgatccacaattactagaggatggtctagagagaaccaagtgtttctgcaagaggcatggtaaaatcaaggaagccagctagctcgtgaatagtttcaggctttcagcatccgtactcatggatgtgtagaaccggcatcatgtgagaataaagttgaatcaagttggacacttaaatcagcacacattatgtcgtcaaattcctcaatcgaggaacttgtgtatcttattagttattatatattcgaaatcaaatttaagttcacgaggcattgcatttttcatatgaatatggctcatgcatatatatatttgtgataaactttgttgccagttgatcagtccagatagtcaacatttttttggacactgtgttcagcttggggcaccaaatttctgatgatgatgacgcgtccaccgtgctgaccatcggatctccgccatctcgcttcctctcggtgggcctttgcatacggaggtagcttctagtgggccgacaaccctgtgcaggcccaaatttggatacggagttagcggtaaacatattgtggtcccggtataatctgatttgtaccatatcgttagcattgcaagtttattacgtcgttataaggtgccctccacggatacggggcaccacctgatatgggtggttagcaaacaatccttgtattgttatatggtatatacaggatagtctgcttggaagggcacatgacaacatgtgcttggcatttttgcatttatattctttcttttctagtattattttcgggcttatttttttaaatgctttacggctacaattttttttttcaagaaaaagttctggactataaaatccaacactgaaacttctatgtgaacttcaatgaaattcatgggaaagtaagtttaattagtaaagaaaaacccaatcgtaattaaaaaaaatggacttgctgcacaaccgtcggttgttttattttgatttgtcaaccagatttttctttttcttctgaaggaaaggcaagagactttgccttatgtattaatagaggagggcatggcctcaatttatgtacaagggttgcttaaagaaagtgacagccggcaaaaaggaaagggagaaggcttactctcccgacggtacaaactcagtcaggcatcgagcgcctgccctatacgcagctccatctttgatggcctggatcagagctgtgggcgtttgcgtcatattccggaagatccttgcgtttctttcgttcgatctatagtatccatgaaaccatgatgatcaacgtttttaggggcttcttcggtattctaggaattgaaacgaatccctcccacctttatgtacaaggcttgcttaaagaaagtgatagtgcacaaaaaggaaagggaaaaggcttactctcccgacggtacaaactcagttaggcatcgggcgcctgccctataccaaagtgcagctccatctttgatggcctggatcagagctgtgggcgtttgcgccgtattccggaagatccttgcgtttttttcgttcgatagtatccatgaaaccatgatgatcaacgtttttaggggcttcttcggtattccaggaattgaaacgaatccctcccaccactgcaccgctgtgtcatactcttgccaatcctatagatgcagatcatagcatgtctagcgctccatttccttccaaatcctgatggaaagccgtcactttgctaggaggtgtaacgacgtttccagcgttgtcccacacagagggcatagcggctggtttgccatgccacgcctttgaagtctatctgctctccatacttcgttttgcagtattagccatgcaaagaacttacatttgggcggtgcccaaggttcccaaacaatgcgcttgaaaggcttcgcctttgtgccctcaaattgcatcatgtacgccgacttagctgagtagcttcccgatgccatgagagtcaagttatttcatcccgttgattttcgaataaagtgacttgctgcaaggccataagatttatctttaagattcgtgcttactagttatcatgcacgtgcaaagcacgtttgtcataatatatatcaagaaaatatatagtcacatttaaaaattagaaagtacacatactttgaaaggtaatttattaacacatatatatcaagtgcatattcaacttttctgaacattgcttctcttcaactattgaatttatagagctattaatttgtgcatatagaaagaaccaaaacaaaataagaaattctttaatatagccttttcaaaagactaatcacaataaaattagagaattcttcaagaaaaacagacagaacaaagtagcaaaagacatgttgttttgccacttcctttttcaacagaaattattgcagcattgagcagccttttgttaggataaaaatgattagttttattttacaagttatgtttccaacaaataaagtgtaactctgattacatttattttagccagactggcccaagagtaggctaagcaaattcattaagattatgagatggtgttacaaactaagcgtccacacgaagttgtcaaaaccggttacaaagagcgggagagaaaaaactacaaaaggaataatgccaatcgtttttcgcctaccatgaagcctgcctccctccagattgtgatttcttctttgatgtcaccaaagagctgcacaaccatacaacttgctgagacaatctctgaagaagaagagtgtaccaaaaacttttctgagataatctctgaagcttctccttgaagccatctgccaatcagccaagtctacattgaggtcactgggaagcggaaagccaacattcacctagctcctgagcaatctccaaatcctgtttgtgaaagcacattgaacaaaaaggttgggtgtcatcttgaaatgtcaggttgcatagggagcaattcgcctgatgaggccacccgtctgttgttttagagccattagacaatcagaatatgaaggcataaaaatacataaaacggcatgtacttcggagtatactcttatgaagctatataaattaaaggatgcgaccacacaaatgaaaattgaaaccggatctagatcaaagcttatcgcaatgcagttaataagctgaacatataatttacttcaatactccagcatttactatacaaatagctcctaaataccgtgcgccaaacagtgaaatgccatggtgaaacatgataggattttaccaaaatctccagttggccacaatgtcaacctgtattataaacaatagaagtaagccaatatattcagatgccttatagcattaacagatactttttgatatcatgatttctcttattgttatatatcagaaacacgttataaacctaatttacagttttagtaaagtaggggaacaaaaaaaatctgacacttgcatgtattacatacagttttgaccttggtagcatgttaatctgcaaatctgaacattatttgccacaaattatgtatattttctttccaaacttaaacaaaacctgaaacaccatgatgtgatattcattggtaggagtacatactggttctcaaacttcctcagtgccacttttttttaaaaaaaaatagtattgtacatggcacctgggtaatctggcaatagttattggacaggacagataatttgaaattgcttttgaaatctaaccacccaatcagtacaccgcaaaataatattacaggttgtagtccggtacctagaatagtagcagagtgccggactgggaaaaaccaaacaaagaagatatattcagaaatacacatatgatctattataatgaagcagcagacctaatgtataataacttctagatcacctcgatatctttttctataaaatgatcctaatgctcactgtaaataggtgaatatgggtttggaatcttttattcctaggggaaatatcgagataaagatttggaagatgagaatcaccttggatttatgcatatccttgaagcgaaggggcacatcgcagtgatcaagaaggtagtcggccatcatttcgttcctacttgtaaatgtaagatgtgatgacaggaaatatagccaagaaagcaagaaaatcaacttctaaagtgaaatggagaatccagtttaataacctatgtaatttgtacaaaagacacatgattccccactatgggagagatattaccagtgcaggaaattaattgaatggattagcattcagagggaatcgtgtgatggattggcagggatagtcaacattcagtgaggaattaaactgtaagatggacctcggctccggcggtggatggagaagaaagtggctccggcgaggatgcggcggcgtggcggcagtacacaggagcgaggaggagcgaagtcacattccagcaatttttaactgctgctacagaagaaggagcttgaaatactggttccaaattgacccgaacaacatgcaatgcacttgtgccaggtaaaattataatattgtgtttagtataaagaacattataggtgagagcacttacatggcaatacctcgaacctcctcatctcagcaagaaacatatcaagagatggcttgtcagtcctcacgtctagatcatcccccatgacaacatggtacatcagtgcaagcatcagtctttagggtaaaatgatgcgcgtaaacaaagaagtaattaaattgattctaatttgaaaagctaaaggttgagggcaaattaccttgttacaacagccattggtattctatcaatttcatttgaaaaaaataatttccggaggggaagatatgtggtgcatttagggaacggaaagaatcccctacgatggtggatcagacagtggcctcgttggcagaagagtccagatcctcttacagagcagcggagaggtccgtggactctctgttgctgaggcaactggccggatctgctgggcgccttagcgagggaccggccattgcatccggcttcggggaaagagctccatgcgtgaggtgccttgatgtggtggcatcggcgggggaaggcgacgacgcagggctcgactgtgaagggggattggagagcgagcgtgacagagggatggttgccatccgcctctccctcttcactctccccaccagtcatctcccgcgcgacggcgcctcctcgccgctgggatggggccgtcgggatgggggagtccggtatgagggatggctggatctgtgacggcgcggtggacagctggccgggaccgcgcgacgacgacgacgacatggaaccatcggcgacgcggtggaggaggaggcgggatgggggggatactggaggggtcgggaccgcgcgatgacgacggcggcctggagggaggaagcgtcgggaggcgcagcgcgcatctgagcagcgcgaggaggcgcggcggcggagtcatcgcgcggggagagcgtgggggcgtagatagcgcggtggatttgtgtggtggtgggatggcggaatcggtgatttcgctgttggatcaacagatcggacggctgaggacaaagatgattgggggatgatttggcctgtagcattggaggggggcaacttctttttatattagtatagatatagatatttatccaaatccacattcaaaagctacccatgcatgctgctactgtttcccatgttttctccagcactcacgctacgcagagaagagtgagagggactggataaggcacttgtcgggctaccggaggccaatccctagtcccgaactcccgatatcccagcatgatcggttgcctcgttcccttgcgaggcattgaagcatgccagcgtcctgaggccgcggaaagcgggagtggctacatagcagcagcggcagatgtgaggcagtaggagaggaagcaaacaacgatgatcggaaaatggatggaaggctttgacaagggatgcaccgacgatgacgggtgcaccgcgccgctcctgaagacaccagaagtcttgattttaaaacactaatttaagggcctgtttggtgtgacaggatggcagccaacaaccacagtagcaaacatacaatttctaccataattattgcagcagcagcactgcacaaccactcagttggacagccgaacacaccctaagtcgcccgatcgactcgatgctagaaggggttcatgaggtgatctctacaagttttctttttgtcaacagagaagccgacatctctgccccggctaagatgctattcaaagcagacaaagaataagaataagaaaagagaaaggaataacaacaacaagcaaagtagacgaagaataagaaaagagaaaggaagaacaacaagcaaaaccgattgaacggcttcaatggcttcacaagaaggtcagttatatcaaaattttgcattaagcaccagatcgatgatcatgtttaggagaaaaattaagtgattaagtaaattagactccaaaattttaattgtatagtactattccgatcccattgtataacagttaggcctcctttaaaactaagtgattcccagcgtcttgctacggggattacttagtacttttcaatatatatttttttttacaatcaagccaagggtaaaaggaaaacaaatgaaatatcaggtcttacagtttttagcataaaacaaacaaatgaatctcgcacttcaatgtggaacatattgataagtttatgttaaatattataaaaaagattagaactactattgggagcactgcacgctcctatattccaagcgccaaacgtgtatcagccaggcccacctcaccccacatttcatcatcccgctcccaccgttatcggagtaaacgatttactttgataaaaacaacttccctggttacgatcccaccccacgtcccttcatcccactcctaccgttatcagagtaaacgatttacttcgataataaaaacaacttccctttcgatcccaccccacgtcccgcatcgtgctcccaccattatcggagtaaatgatttactccgataaaaacaacctctctacttctggtatatattctattttgcccgtacccaaccaacccctctcgcccccacttcattttttttcctttttttccagatctcaatcgatccaccatcccagcccacagatcggcgacgcaccatggaggaggacgacgacaccgtggcagttgatggcggtggccggtgaacggtggccggcgacgcttgaggcgaaggcactgcttcaggcctcactgcagcaacatctgcttcagatcgatgctgaagagacgtctggcccatggcaaacgaggtggacgtcatgaggacggtgagttctctcaacaattcctaatgagattctttatttcttgcaagaattgtatataatctatgattaattaaattctttatccttcttgattgtatgcagtctgacttcgattgggttgagcactcattttggcgtgcttctctattctcccttgcatggcggagatcctgtttgtgatggttaatcgatttggtaacatcggcaagaaactgtgatttgtttcatcacctctgtcattccccagtttatgacagtgaggcggtgacaacagcaacaacgacctccatctttggctccgtcgccggatccggctcctaccgaggtcgcagcggctagacttggtgctgccttggctccagcctgcatctccgccgctttgtcttcttgctagctctctctagcaggacagaaaccggaaatgctactgggtgagcgatcgccctcgctcgcccagggcgatcagattcaccccccctccacccctccacctagtttccttttttggcaccgcattactttcctattttagtaaatttatacatctaaagtttatacacctaaagtttacacatctaaagtttagagaccaaaagtttataagtcaaaagtttatatatccaattcagatttgaatttgaattcaaatatttttttatatatagtatttctatacatctaaagtttatactcctaaagtttatagacctaaagtttatatacatgtttcaaatttgaatttgaattatatcctattcaaatttgaatttgaattcaaatattttctatatatagtatttctatacatctaaagtttatacacctaaagtttatagatccaaagtttataagtcaaaagtttacatacccgattcaaatttgaatttgaattcaaatttgaatttgaattcaaattttttatatataatatttctatacataaattttctaacttttgtttctttaaaaaatttttgtggtgtactgtagtaggaagagaagaaggggatgaggaaggggagaagtgggaggcctataggggcaggggggcagatccgatcgctgggcgatcgccctggcgatcgatcgcccattagcccccccggacagaaactccattcagccgtcacaaggaactggcgattgcgtgtattgctgtgtttgtgtgtaaaatttttgttcttgtgcttttactatgatgtgcatgtaaaatctttattttttgtcctgtgattttgaatggagtgattcaatgaataagtaaaaagtttattcacgtattatttgggataaactaattaggccccagtaactccctccttattgatgcactcactataagaaatcatcaaccaaggctagcaataatgcaattactacaagttaatgcaccatcaattttcatttacatcgacagtaatacgaatactacaagatttgatcaaccaatcttgttcataatccaactactacaatgtgacatcccagcctaaggcttaataggataaatagaatactcatatcaacaagttgcaacttcttttccggaagccgatctcgaaagaactctgaggttaagcgtgcttagcttggagcaatttcgggatgggtgaccgatcaggaaattcttcctgattgcgcatgagtgaggacaaagtgtgcagaaaaggcttgtgttggtctgtgatggcagtctatgacctatgaaagcgcatgagtgaggacaaagtgtgcagaaaaggcttgtgttggtctgtgatggcagtctatgacctatgaaagcggcatggtatgcatggctggtgtggacccggagtggtcacacagcatggcacatgcgctggcattggacacatggacgtggccaagaggaaaggcttgtgttggtctgtgatcacacagcatggcacatgcgctggcattggacacatggacgtggccaagaggggacgttcctggcctgggttgatcgacaggggcgtcgatctctcttaagggggtgagggtgtgacatcccagcctagggcttaataggattaatagaatactcatatcaataagttgcaacttcttttccggaagccggtctcgacaaagtgtgcagaaaaggcttgtgttggtctgtgatggcaatctatgacctatgaaagcggccagatgtaagcgagcccggtctgggagaggcgagacgttacatacaagcacgtgcaccatcatttttcatttatgtcgacagtaactcgattactacaagatttcactaatcatggttgtcgttaatctaattactacaggcacatgcaccatcaatttttatttacatcgacagtaattcgattactacaagatttggtctcagtttgttacacaccatatcataactacctcgattggaaacaaagataaaccaattacaatgattattttcaaccgaccaccgattttacggatctataattgatttaccccaaatttaaatagaactaatctagacagatagaacgtgggcaaacaaacaccagtttttgcggactctgggcgtgatgttaattcgattactacaagatttggtctcagtttgttgcacaccatatcgtaactaccttgattggaaacagagataaaccaattacaacgattattttcaaccgaccaccgattttacggatctataattgatttaccccaaatttaaatagaactaatctagacagatagaacgtgggcaaacaaacaccagtttttgcggactctgggcgtggtgtgcggtgcttggaacaatattccagctatggtggattgctctttcagctccttgattggaaacagagataaaccaattacaacaattattttcaaccgaccaccgattttacggatctataattgatttaccccaaatttaaatagaactaatctagacagatagaacgtgggcaaacaaacaccagtttttgcggactctgggcgtgatgtgcggtgctcggaacaatattccagctatggtggattgctctttcagctattggtcattctgagtgtctgcctctcaatgagcattcctttcactcctggctgtgtgacagtcgcaaaagaatggccaaggaacatcgtcgagggttcgacaccattgcaactttggtggcgtggacgatttggaaaaaaagaaacaatcaggtcttcaaccaaaagagcaggacatgggcggaaattgctatggacatgacgggcgaagcggacctttggcggttggctagagccgcgataccggccatggcgacccttatgtcgggtggaaggtcgccacattcgttgggagattaggcttttattttcttcctcctcccccctcctgaatcttgtccctttcgtgttttttatttattccttcttaatacaaagatgcgcccctcgcctattcccaaatatatatatatattccgcgctctagcgctcggaatagcgctaccgaaaaatgatacatatatttataaaaatattatggaaatgatgtgagagatgatgattgaatatgtttggacgcatgttgatttgtagaattaaatagattgtagatgatattgcttgtatgaggttgaatatataattattgctagtggatgatgatgtggcatggttgcatgttaagttttagaattagtgggttataactttataggaagtatagatataggattaaaacagagaactaaagaaaacacagaatttttataagaatgcaagtactaaaaaagattattaaaaaagaaaaaaattacagaataaccgtttaattgtaccgtagaaaaaaacacaacaattttagaaaggataaagactcaaatcaaactttctataaggttgggacttccatagaatgaggtattctataggattcaattttcactagaattaactcttcaattatcatattttgaaaaaaaatagttatactaagcttttaacatatttcaatcatataatgtgttgttaaagtttgggtacatactccctccgtctcaaaatgtatgatgtgttgaattgttttataatatttgatcatttgttttattcaaaataaatatataaatactatttatttggttctgacttgttttatcatcaaagaaaatataatcttaacttttagttttatatatttatactaaattttatatattttgggataaaaaattaacggtctcgtacattgggctatccataatccaaaaactatgaagtagtttctatacttgccatatcatatagacactgtgtagaaactatgtattcaatggatggtgtgttcaattaaattctcatccaatcacctctcttctctctccttttatctatctatccccttattattttcattattggttcttgtgtagagatagtttcttgcatgagaaatgatttcttcatctttttacatatctcctcgttaactctcttgccacatacttcctccttcccaaatataagtttatgcaccaagaccaaggacaatttaaatcgcatcaataaagacaccatgcacacatttctcccacaatgcatgcatcaattaaaatcccataccaattacaccctagcatacatacattttcacatactatactacattaattatattctgatgaaatccgtatccatgcagttgtatgatgattaatttagaaattttgaattctattacataatgatcaatttgggaaggagggagtagaattttttacttatgtgacaatgtatttaatgctatggacactagatgacattatggaacgaaagagagcatacagtatatgcatttgtggaccaagacaggactacgaaatactactccatttcaggtgtgtttagttttacgccaaaataggaagtttgaagaaattggaacaatgtgacagaaaagttggaagtttatgtgtgtaggaaagttcgatgtgacgaaaaagttagaaatttaaagaagaaaattggaatctaatcagagccttcgttggaacttagaaatgcatggctgagtatgagggtggttggtgtaataagagaaaaagttaggctgtgtttagttccacgtcaaaattagaagtttgaagaaattagaataatgtgacagaaaaattgaaagtttatgtgtgtaggaaagttcgatgtgatgaaaaagttgaaagtttaaagaaaaaagtttgaatataaaccatgccttaaataaatgagagttgtggatactggatataacaaccggacaagcagtaccgatacaaaatataaattgcttattttttgaacagatggagtatattttagaaccaataatgttaaacaaatcgttcacgtgatacgtgatgttctacctcttcctattaaaaatactatatcaccataattattgtgacatctgtgacgatgcacagccagtacagtacagggtacagcaccgccgatatatggggagaatatatttccatttttgttcaccttcgaaacgaacaaatttggataaaccgctcgaagagcggcatccgatcgagctaacaatggagggtgtcggtggcggcaagcgccgcggggacgacggggcggaggccacgccgcggtggcgcttctcccggccgtcgtcgcagggcgggcccctggcggccgccggcctcacgagcatccgcgcggtgctcaaccgcgtcaactcctccgtcgacgccgccgccgccggcgggccgcgccccgtcctgcggctcggcaacggcgaccccaccgcgtccgcctgctaccgcaccgcgcccgccgccgaggacgccgtcgtcgacgcgctccgctccggggcgcacaacggctactccctaaccgtcggcgtcctctcggcgcgccggtgagctgcccccccccccccccccccccttgccacactgtgctctgcttatgttctagtatgtgactgatcagaaaaacagatttgaatatttttatgggcaacattttgcatacttggattttttttagtattttcaacaaatttaactgcataaagtatgtgtagtttgatgttttagctcttttgttagaaaactctttgatgttttagcttatgttatttggttcctgttttcttctctctttaattattttgtggttctagtttgaattcttttttccatggaagatatgtttggtactcctcattcacatactggttgcacgacgaagttgtaattacatatttttttcacctcttgtttccggtaagaagaaaaaaatagaaaaggaaacagttcttcaatgtttatggtgactgtcaaattaaatttatgatacatccatgatttattttggaattttcaaacccggcatcacagtgtattcaccggattccctggttcccctggcaccaaacaatttctggccgattgagcatttattttgtctggtgccttaccggtgctttcttgacttggacaaatattcgagtacatagggagatgctatttcaagaataggaaaaaaacaaaaggtacttttgacaagttgctgggataccaaacagggcctcaaaccttccaagctggaaactttgaaatttacctgcgaggtaaatttaatggagaatggttcaatatggagctggaaatttgattcctttttataataataatatttttactaaaagcaaatggaggaataggattccatttttgtcattcttatctcttttctatggatgtagatatgctttgactcctaacattttgatgaggaaagaaaggggaatttgttgatgttttgttgcactaaataactaacaaaatgtaaatcggcatgtttagagtgtggaacaatatttcagaaaatttcaaaggaaaaagaaaaggatctgcagtgttctaattgtttcttatccatatagtagtacaatttaccaacttaggaatgcatgttcatatccttctctcttattttcttgtggtgatggtcatattgttcttaactaaataaaagaattctctgtgcatttcttgtaaaaaaagtactaagtcaggcgctcatctgtaaaatattttagcttctcttacttgcaataccagttttttaaaattcctgcttgtcaatactgcatgatattttcccaaagatttcaatcttgaatggtgtgtatctctcatatttacttgtttaaactttagtgctattgcagaatacctatctcgagatcttccttatgagctttcggcaaatgatatttacctgacctccggatgtgtccaagcgatcgaagtcatgatctctgttttggctcagcccggatccaacatcttacttcccaaacccggctttccattgtatgaatcacggactacattcagcaatctagaggttcgacatttcgatctcattccagagagaggctgggaggtagacctagagggtgtgcaagctattgctgatgagaacactgttgcaattgtcgtgatcaatcccagtaacccttgtggaagcgtgtattcgtatgatcatttggcaaaagtgagtatatttcttggacaagtaaggtactgggtattttgttgtgtgatgcaatttgccatttatgtgcttttaacaaacagattgccgagaccgccaggaaacttggtttgctgataattgctgatgaggtatatgaccatttggcatttgggaataatccttttatacctattggtgtttttgggaagaccgtcccagtgatcaccttgggatctatttcaaaaagatggcttgtacctggttggcgacttggttggatagcaacatgtgatccaaatggcattttaaaggaagccaaggttaactctcgatctgtgttccaacatccaatgcatatcttgttttgatccatgactaggttcactattggttcgcgaagttgtattgtgctcgtaaatttgcctaacaaagctgcacattctgcctaagggtaaactgcagaagtgcagatgaatttgatgcctctttgattccaggctccaaaacagtttagcaaataagcacacctggctaggttttttacatttgtctagcctgataatttcttcttagaaatacttggttaatttgcgttggtagcatagaatctagaataatgtgttagtgcaccattttgcggtggctgatagtatttttgtatgctacccagatctttcccttccttttctttttagttgctgcatgtgcattcaattacattttgaaggggatattttgtcattatattcctcacaaaaaaaggataataattatattgcactggcaattggatttcttatctaaaatgtttcatgacaggttaaccaatcaattgagaactatattaacatctcaactgatcctgcaacgtttgttcaggtatatgtgcctttcttattttcacatccatcatttatggcaatatgatttacagacatattcctctttttctggacacaaactctctaacaagcatgcacatgcatggcaacataatttttcagaaagtgtgttacattctaatattcttattcacagggagcaatccctcaaattatagccaacacaaaagaagattacttcaacaaaattctcgatcaattaaggaatgcagcggatttatgttatgataaaataaaggacatcaagggcattacatgtccacacaagccagagggatcaatgtttgtgatggtaagaaaaagtacaggctaacatgctctggatgaactggctcagttttgtatcctaatctcaatcatcatctaattcatgtctatcctttatttttcaggtaaaattggatctctcttacttggatggcttccatgatgatatggacttctgctgcaggttggcaaaagaggagtctgtgatagttttgccaggtacaaattccataaatgttcaacctcttgtatggtaaaaaaacaggacgaccattattacttccatttagcaatataaatcaaaatccactatgtgcacagaaatactgtactacagccactcaacgtgtcaacctgttttaagaattttatggatacatagtggaaatacactggaacaactacacattaatgtctgcaatggagtcatattgttagcaacaactccacaagaggaccctaatgcgaaacgaattgagcatctgattagtttcattatgcttcttccattattataacagagacatcatggtaaattgcgagacacagttgcattgtttttttttcatagcagcctttgcgtttcaaacattgtcttgaacttgattatcatatggcatgccttcctattatatctcagccattttgtcattgctttaacatatagtgtaagtatactaaacaatgttagttagaatgcaatttcaccattcaccaatttcctaatgataatgtgtagtacactagtaggtatattctacaaccttacatggaaaggcaacacaaataaaggttaagaaacttgcaagaattaggctaacatttacctctgttgtatttatttgtactgaactttatttctcttaatgcaacgatacacaaaccttttgcgtattaccgaaaataaaggttaagataagacacagcgtgaaaaggagtttaatttgtccagatggcacgccttttcttgttcttggctactcaattctgccccaatgcacatgagtatttctcaggagaaaaaaaaatattttacagggagtgcattaggattgaagaattgggttcgcatcactttcgccatcgatataccatctcttgtggatgcctttgaaaggataaaatctttctgccagaggcatggcaaactggaaacctaagcacaaaggtgttgagatatttcattattgtggtgcatcggcaactacgcgttggggcacccaaatgttgttcttaataatctgttgctgtgaccaagatgatcatttaccttgtcaaacatgtatatcgtattcttccggcaggtgaactcaaacctatcttgtatttgtaatgtattaattgtcgggaaatgctgtaatctataactgtaagtcattcttggttacagttgatttgaatacgtcagcctgtatacgacacatttgtgtaggactaaatgggtgtgtgcgcatgtgcatctgatttgagcaaaccaattcaaattagttacttatgggtttttttttcattgtgtctatctttagaagttagtttttgagtaaatttcacaaaaaactataagtacttagatcaaaatatcgtaaaactacatatttaacacaagatttatcataaaactacatatataaggccaagtatcataaaactgtagatttaatactcaagttattacaaaactgtatattttacagttgaattcatgtcactgctattatgttagagttataaatattgtagttttgtacttaacttggtgtagtcatgcagaacatgtaatttgtcatcattttattcctaaacctatatttttatgatatttcatcttaaatttgtagttttgtgatagtttggtaaaagtacatttagtttttgtgaaatttactcttaatttttggatatccctataatttaacaagatgtggattatatattataaaagtatttatcatagtggaaaaaataaaaattttatggtgttaaactatatgaatttatagtggttgatgattaaacattctaatatttaactatatagcagtagagtatatgttaaatatactattataaattaactattataaatttgaagtttggagttgagaaaaaaaactaggcctaagtggaaactagaaacaagctgaaacttcgaccctgttttgtttccaaaacaaatacttttcacccatcacattgaatatttggacacatgcatggagtattaaatgtagaaaaaaatcaattacacagtttgcgtgtaaattgcgagacgaatcttttaagcctaattgcgccatgatttaacaatgtggtgttacagtaaatatttgctaatgacggattaattaggcttaataaattcatctcgcggtttactggcggaatctgtaatttgttttgttattaggcaacatttaatacttcaaatatatgtgtccgtatatccgatgtaacaccccaaaacaaaaatttttgccatctaaaccgggccttcgtttaaattagaacaacaaccaatttgtggagggatctcttgtctccttgtcttatttgattgtcgcatttatatttgtgtaatttatattcctaaagacatacttgagatcatatcaccctaggattgcaaaactttgacataggagtgtgatttactttcctagagaattaattgagccactatcaccctaggtttgcaaaacataacttagttgcttagttagacttaaccctcaccaagcctagcaacttaggttagttttgattaggtgccatttagttttaaaatcgcctattcactcccctctagtcgacatctcgatcctacaatttgttcgtatcttaaattttgttggagataagagtcgtgtccggcaaggaactgtcatatatctcgggtataaatataacccgatcccatgtaattaacaatgacagttcaataacactttcggtgtatcgccacccttttttatttttattgtttcaacgagttcttgcttttgggttgagctgcatcgatttcgatcttcaacaagaggtaaaacttgtcatggcggcttgcgttcttgggattagtgcttacatctttatgacactctaatcttggttatgtaaatcgtcgagttatcgtatatgctatataatttctatcaatatcgttgtctaacactaaatcggttaacatctacggttagaaggccgctgatggggttagacagcaacattgatatttaccatctcgcagaggttttcatcaacttgtgtagatattatatttgtccctatgcttaatgctgcatcgagttcgacctactaagtaatatctatagctataattctaacttgttttataattatcaatagagatagtatcggagtttcagccgatcttacctgatttagctactttgctctctacatgactactcaatatgctaaatctgccctttatattaagattttattgcattaaaatatattaggcctattgtctggtatagtctatctgcttttaatatcctaatatagagtggtattggagtactagtcgatacgtgttaaatctgtttcatcggctatgttataaatatatatatgatcttcgtcttaaagtacttttaagcataagtgatttatactgtctcggcttgctgtccgatctatcccaatcatttggcttaaatatacttctagaagtagattatatattattgatatctacagccgatcgagcagatttaactttattttgtttaattcttcattgccgatctaatgccaataacgttggctcaataattaacgatatgtcatcagcctttagccgattggctatcgtttattgatttaaccttgttttcttgtttttctttcttgttgattgcagaatcaaatcaactggcacgtttttgaacccgaaagcaagatttaggacctgcactagagttaagcagatctctcatactagtatgtgtttttcgcatgaacagcaggctgacgaaggagtctgtccgtgggaacatggtcgccgccatgagcgtgcccgtgccgtcgagccactggagcttgtcggcgtcaccgagcgcgcggagatgcacaggagcaaggtgaagctgtccggcgtcttgcacatgggcttcaagcccgacaagtggtcagtttgcccgcctgcctgcctgcctgcccaagatcatctcgtcctcgctaactctccgcgcgcgtttgtgtgcgcggagacggcgcgtgcttgcaagggctaacagtgtttcttttcttttcttttttgtctcgtggatgccgcagcaagacggcgctgcggatggcgctggcgcggatcaagctgctgaggaaccgcaaggaggtacaggtgcggtagatgcgtcgagaggtcgcgcagctgctcgaggccgaccaggaccggttgtcgccttgcaccggttgtcgaaggcgagcgccccgggggtgaaggacctgacgtgacggtcgtgcgcgacgcggaaacgatggcgcaggtcgccggtgagcgcggagaagacagccacgccgccgtcgcgcctgccgggcctctcccgcgcggcgacgaagagcgcacggcgccactcctccatcacccggttctacacgcgcacggcgccgccgtcggacgcggcgcggacggccatctcgtcgcccgcggcgctccccgccacggacgccgccagccgcagcccccacgttggccacgtcggccgcgctgcccctgccgcagccgagcgcctgcagcacctgcctccgcgtggtgttcccggtccccgcggcggcaaggacgtgccccgtgagcggcaggcagaaggcgcgctgcgccgcggccagctgctaccgacggcgacccctctcctgccgctcctctccctcgccgccgcgccgcgcgccgctactctccgccgccgagctcgccatcgcgccggccgtctctccccctctcccgctaccgccgcccctgcttcgatgccggccgcctcacgccgagtctgccgccgtgcctgctagagagaaggagagaagagaagagaaaaggaaaagcaagaaaggagagttatggggcctacaccatcgcttacatgtgggccctgtatatttatttttttaatttttctaactagaatgacacgtcagtaaaaccggacataaatactgccatgggatctcccttgcacggtttgagtgagtttagaagtgaacatttttgattttgtagttaagggacctcaaaaaaactctcgctgttatattgagtgacctctggtgaacttattccttcactaactactatacctgctctaaaacaaacatttcacttaatgtataatagacatcggcaatcaactttatttgacacctatgtcatttgtttattggtctatcagctattgccaaatttaaattttaaacttgattttaagttttagtgtagtttgtttttaacattagctcttataaatcatacaaatataaatatgtaagttttactcataaattatttataattgccttgcttaatttacgccttattagccatagagcaaaacgatgtgaggctaaatagcaaatgggaaaacgaattgagaatttaggctattcgatagtgctaaaaatgaagattaagtatgggtgcataaaacaaaaatacaatcaacacatgattaattaattaaatttaaatttttttaatcttgaaaacatatttatataatattttatagtaatttctatataaatttacgtatgaaatgcactgtatgaaatgcacagtttaacagagtgaaaaatatgctaataaaaaggaggcctagtagtaccattcttaattcctctatcgagctttatttccttcaaccactccacactgtgagagtgtgagttaacgatcctcatcagttcctcaccaaccacccttccaccctccgaaacggttcaaactccccctcaccgacttgccggacccactcctcagtcctccacatgaccccacctgtcatccacatcaccgcaattcattctgacacctggaaaagcaccaccgcttgccgtgtggccgtgtcccgtttccccaacggctatattcccgcacgtacgcacactgacacgtgggccccataaaaatctcccccacccgctctcgctttcccacctccttaaaccccaacccaaccttctccaatacgccaaatacaccttccaaatccaacgccgaccaaagcacgcggcgaggcaaatcgacgaacacatggcggccatggccatggaccacgaccacgaccacgcctcgtcgccggcgccgcccgcgaggctccccgcgccgccgtaccaccactccccttctgctgctgctgctgcggcggtggaggaggtcgcgacgccgccgcggaagtccgcggcgggggcgggggcgcagaggtcgtcgcccatgccgtcgccgctgcagctgtcggggtgctcgctgcaggagctcctcctgatgtccccgccgcccgggtcggcgcgccgcaactggtcgcggcatcgcggggctgggttggacgagagcctggagatggtggcggcgccggcggcggggacgccgccgaggcggaggcggcgcgtggccgcggagcagtgcgcggcgcccgcggtggcgtcgccgaggaacgggcggagggcgaggcggaggctggagaaggagatcgaggtggaggacgacgccgcgcggagggcacgcaggaggaagtccacccgggcggcggcgaccaaggccgcgcctgcggccgcggacaaggtggcaacggcggcggcggataaggaggatacgagcatggcgttggtgctggctagcaccgatgcgatacgaggttagcgaagccatctcttgttggttcttattggtttggggctaatttttgcctcgagaaaatcactgctccagatgctctcttttgctcttgctctcgttgtgtatggggaattgcctcctcgagttcgtgtctaatcggatctcgatttgtggcgcaggtgctgatgccctcgagcagtctgggtgggaagatctctgggaaaggatcgtcgacttggtgatgtggaagaatgtggcgaaatcggcactctggtttgggttgggatccatgttcttcttctcctgctccttttcaagggagatcaccttcaggtttgcgcaatctgatccccttctacctggatttcctgctttgcagttcatttcgttcttttgatcatgtactgttactgagtttcggctttcgggtgatgatctgcagcccaatctcggcgctttgtcacttgggtgtgatggtcttgggcttagccttcttcaaagattccattcctcagaggtatgacagtatgagccagtggcaatctgtttgtaaacccatttcaatcaaggcaatcaatctgagttctcatctgcagcaggcagcaggtagagaggggaaggagcttcagattgactgaagatgatgtgcttcgtgctgcacgagccgtgttgccagttgcaaactccatgatatcaactgcacaagtgatcttctctggtgaaccatcgatgactctcaaagtaagcatgtaccgaatttgatgacattcttttggcacacaaacggtcccctgagtaatacagaagtctattgttgccgaatcttaggtattacctgctcttctgtttggtgctaaatacggtagtctggttacagtatggagacttctggccacaggtacgattgtatacacaaagaagaatatcaatgtttagggtgactgctctgctgaagcttgttgtgtttaatggaactttgcagggtttttcaccagctttacactcccaaagctttatagctgctattcaagccaaattcataagagaggtatgatttacttgtttctattgagttaaccttctccgtgctatatgtcaattgttcagggcgctaggctaaatttcctcctctttttagttgaaattttgagagatcgggctctagaagcatggaagtcttgtccccgcaagaaactcgttgcgggtacagcagtgacaatgtgctggaacatgttcagtgtgaagacccgcatcattgcaggtatctatgctgatatggtttatactgttggaataactttataaccattgtacttttcatgaaaaatgttatgtatccactaggtactggtaaaagtattttcgatacagtgtttggtcacatctgtaaggagaccatttttatgaactggctaggaacctactgaaaaatttcaagtagaaagatggttcttctttatatgttgactgtctcagaccggccaccagcatgtatcctgttgcaaagattatacttgggctatacaataagagtagcaaagcaggagtgttgtgtttggaagcctaacttaaagatcatataaaccaacccaagaacccatagtgagaaacataatggaatattgagaccattgatttctataagtaggtaatgcattgtgcgtgatacaaaaaatattttctttggaagtatttggtgttgcctctaaattgtgatgaaaaactgtctggtttggagaaaaataatagcctcctacttgtactttctcttttacttgcaccacttgaaatcaacatgagctgcaatgaagagttgctattatttgataaaaaactcatgctttgaagataactagtagggtggcccgcgcaattgcgcggctagcatccatagaaaaatatttatttttctctaaaaaattatttaaatttttacacatgatttttataaaatttattatatcatcatctcattgttgtaggattttcaaaatcaaactttatcatcaccgggtttttaattttatagttttataaagtcacacaactgacaccccctttacttgttgctcagcccgccacggcttatattcatcttccctgcgacctttaaaaatcggacaatagagttttagagtttattgtctcatcggatttcgttttttagtttctagagatcccatcaaatgtggccaccttacatctttatgacccgatcctgcccgctccccctattatcattgttagttaaaaaatgaacctgatcatcgttgcggtcccttttttactctataaaagtcctatcaactatcacgaccctactcctttatggcccactcgccatccctcctatttatattattgggattctaaaaatcaaacctaatcgtcattagggttctatttcatagttttctggaccaccctactcctttacggttcatataaaagtatattttaatttcgtatacaactttttctttttctataagcttagatttcatatacaactcttaactctatttatacagatacaattatattttacatacagctatatcagtcaatatatgttgttattatctaaacccatcatgatgtaacgattaaaatattttttctctgattaattgatgtgagaatttctagcctacacaatgaacgaacgtaatgtcttctttaatacacagtaaattaacacttggcaacaaatgctatgttactggtagtaatatgtgattatacatgtgtagttatgcccgcatgtacctttccagttctgctgtgcatgcaaacttctttattttttctttcccaaatcggacaccatacggaaatactatcaggactccaatatacgtaaatgcatatgctgctaaccaatacagagagatggaatatccttttcctagttgaatacaaattctatttcataactatataagttatgaattgatctacaccgttataatttggacccaccacgatctaacggtgtagatatttctctttttctaccgcgaacgtggtgcctcctttcaaggctgttttaataatataatagatagattgagctgatatgcaatgtataatgtagcatatatgtgttttatttgggtgatcggtttttcttgtgtttcatacagcgtagcaaattattcgttttttaagttttcattatgatctgaacagccttagcagatatgcacaacatgcctttctaatttaaatatgagactaacatggatctatttctttatctgcagctttcatttcggtagtaatcctgcggtataatcagaagtatcgcaaggctgtggtgaatgcaggagctgaaagctgtcaagatgaacaagagcagaaaatggagatagaagaatcataaatatgatcatttctctgtaatgatctgctgttccatgtctagtggttctactatttcttttctttctcccgtaagagaggttggaacatgtcaggtctctcgaatgcttctattatagtgaagcaatcagcgccagcgcagtgctgttgtatgtatgctggtaaataaatttcaagtatctgctatgtttgcgcggcttaatctcaattctcatgtagtcagtttgcgctaaggctccgttcgactgagcgtttgcatgagctaatctgctacacgagtaagcctgctaataaatggatatagtgggttggatttcagtgtgggttagctttgggcgggtggaaatgggttggtgcacctgatggactggactggtttggatggagatgggaaatggtttggattgtttggttttggctgcaaaagtttggttccagattagattcaacccatgggtatccactggattggcccaatcccatcgtttccccgagaagtcgacaaccacatcgccgccatcgctagctcgacttcgtcgccagtggcttgctaccttcctctccctcctccggcaaaccttctcccttcacaaagtccccaaaaaattcggccatggctccggctcttcttggctgtctgcggcaacagcggcggctattgaatagtcccacattcttttggattaaatagaaaaaatgcccgtgcgttacaatgggtgaaagctattttaattgtattattgttagatttttttcctaataagaatgtagagagattgagagacagtgccttggaaatctcaaagaagtttgaaacaatgaggttcgaccccttgctagaattcctgcaaaatatggaggattttttcgttatcatttgaattatctttgaagcaatcctataatcctatactcatgtaggaattatttctttggattgaatttctccatttttttttaaaacaaaacttccatccataagggctcaccgtatatgacttcagcatcatgccttacaattacttcctccattctaaaataaaccaactaggttaggtgtgacaagtttaaataaaccaactaggttacatgggatataacttggtataatgaaactggacaaaaacctgtcagaattcgttgtactaaattctatttttttatagctaggttggtttattttgatatggagagagtatacggaaaagttgggaagcctgagagtgaccgtgtgagacagttgttgccctgtttccatgtatataaaaaagagactgaagcgtatatttacgttgcaagatagggttaagaggaaataattagttatgacttcatccatttcaaaattatatcaatttagtttagtatagggtgaatagctaatttagtccttcaagtttcatcgaaggctcaatttggtccttcacgtttcattttgtccacataactcctctaaatatttgttttggtttaaaattatccttgggtccatttaatatgccatatggctatttgtagtcaatatctctattagaaaatatcccttttgcccttaatttgtatttagctatgtactagatagaaaagagaaaaccaagatgaataaacaacattgcagatgtacttcccattatttcaacatgtgcacataaaacttaagcaattgctatcatatacacttgctagtacataatttgttttcattttacataatttactatgcattatctataaaaaaatcaagcatgcaattttctcttatatatgtgaatgatgagggtataagtgtcatttatcaagagagttgttggtttaagaatgagtttgaactaaaatgaaaatttaaaggactaatatagatagattgaaacatcaagaactaaactgagccttagataaaacttggaggactactttgactattcaccctttagtatactatacacaaaaaatctagtactataaatctgcatagggaagcatatctaaatttataatactagattatatctaacctcgtactaggatactatttggagatagtacatacattaataatattcacttgtccgagagattttttaaagaagacttgtccaagataagctaaccaaagtatgtcattgtttttcctttttcttttcctctcttattttgtttttgttttggaattaaaaggcaacttgccagttccaggcctccagggtattgccatgaggtacaaggttctcagttctctcacacacacgccatgtgtgcaggaagcagggagctaacgggtgcacttccactggattggaacaaataagattaacgaacgagatgcaccgtccacgggagcgccgccaaaagtcttatgggaaccagtcttaattacgtgtcactgtcttgcatcacggttcaccgataagggtccgtcatctttatctggctagtcatttggtccacaatcagagcaattttgtattgcaaacaatttttaagagtaaaaagattccttcagatagctattgctgccgcaaacgccgacggagacgcccataccacaagatcaggaacaaacggctaaagattgccatgactctgtagcaaatgtaccgcgacgaaaaaacttttctgactactactattgcttatactatattgatcgttcggagccgttagatcacataatgaatggccatgattgttctgatgcagggaggaacggagaggtgccgtgtgacctcgcaaattcgcattgtagcaactacaccaataaacacctacagtatgtcacctcacctccctaattctatatcattctaatattctatgtgcaattcccccaaaacccaagaagaccaccatccccggtcttcttcacctttcccttgtcttgattttctcggctgggagacgacgcctgcattcagctgatccgcactccccaacctcaatccggcgaagctaacgatctgaattcaccggcttccctgcagcctgtttggtacagctccaactcctaaatataactccaggagttgagtctggagtggagttgtggagctgcctaaactcagctccacaactctagtacattttgtgagagagctccacccaactccactcccagttttggtggagctgaaactgtttggctgagctccagcttcaggaggggtggagctggagctgtgccaaacaggcccctattactctgagctgctactaaaatgttgctctgctacttgaacttgattatgtcgatactgctactctggaaaaaaaatgcagtgaattggttgcagatctgaaactaatactagtagtcataaagtgtaaaattaaagtgtgaagtgagaactcttagaatttggaatgcgcttctacctgggtatcgttcttttaatttgagtaaattggtgacatttgaagacactagtcaagacatcaggttatgaacttatgatatgagaacagtttttaacaggtagaaacaatgtagattgttcagctttgacaacgagtttttcatagtatgtggccagatgattctttgtcaataactagttgccatgttttgcaaataccaaccagatacagcgtagttatcctggcaaagtcttcatattgcactcttccattttaacagaaatgcatcaatactatgggtagtaataatctatgacacaaaaataccgaaagcaaaaaaatacagaagggcgatgtaataaggtaatgtagaacaaatagaacggcgccaagtcttaactcttacgtcaccaagaacttggctacctgagaccgctgcggctgaccaacagcgacggccgccaccgccatccttacttcgtagactgcagcggggatggatggtataacggaggtggaggaaggaagcggcggcgatgccgtccggcgggcattttgctgcgcggcggcggcggcggcagcatcagccaggaggagcaagagcgaatgagcgagaagggggaaaaaatttcgagatctaaactgcagcggcggcagagcaggagagttgtgacggactccttttaaatttggggagtgatgatgatgagtttgaaagctgtcagctggcagccgcttgaggatccttactataatgtgttgactatcactactattacatttactactaatatatgggtcctacatttttattgtctcacatgtcagtgtgtataaagatagttactatggtagagaatatgaacccggtgcgagataccaccacggtctcacagagcagattaatcgtactaattagcgattaattaattatttctaatgatgctaattgaaataataattctacttaattaattactagttacctagttaatctattaatgtgttagttaggtattctcttttatttttaaaccgactcttactgatacgtgggttctatgattttctctaactttaagtgccacgccaatgtcacgtaaacgccacatgagccaaaacatggtattatggttcaagggtgaattctaaactcggtgacaaatagagagaccttaagtgaatttattccaaataaattctactcaattgggtcgcgtgatgtttggataatgagaaaacgagccggttagtgggccaacagtttatggattatttaggctgttggtacattcaaacacccaaacattatggcatcgtccttttaaaaatttttaaatattccaggacgccctctttctgaaaaaaattgagttaggtcataacgtgaatggtgaatcaaacaaaaatccaaaagaaatcatctgtacagcattagttgggaaaattcttgataaatactctctctcacacgtatacacaataagatgttttgatttctatgtccctcccctagattcactaacatgcatattaatttgaacacacatatatgaagtatatgtaagaatccatgcatgaatatattcaaaacaaaaaacatcttacgttgtgaaacgtaaactaggatgatcgatataccgtatatattaccaagtccatacatgcttgtttgtttcatggcaagataattcaaaaactacgtaccgtcccgtcaatcatgtgccgggaacaataatgcaccttcttcctgctgaaaaaacaatgcaccttcttcttccttaaaaggaaattttattccacgaattaagttagcttgatttcgttaatttttagatatgtcgatttaatctttcgaaaaaaatttcgaaaactcgtagcgatacgatgtatgtatctgcgttcataaaggtgagtacatgcataggtgcgcgttgtgagactattcgaggaatgtagctacagagaattgcgtcgtagttacaaatacggagacgactttgaaagggtcaggtcagctatacattattacgatcgagtcattaaaaataaatacgtttaggtatacctgctctggatcagtagaagaggatgtcaacgagacgatgatagtgtagcggcatccattgcaagagcaaaagcatcgtggtcgtcaagggagagagagagagaggtcgtcgaccccaagtcaatccggagctgtgtcacatggcggcggcaaatcgatcgagcttctccgtttctcaatttgctcagcctttccgcccgccggagtctatcgacgctggcgccgggagcagtagaagtggtggcgcgcggtaccagctagctgcgacgctcttgggcgccatcggcgtcctggtcgactctggcggggaaggctagcctagctttctcgccggggcatatccctcctcaatttccgcccggctccaccgccaccggttagcagcgacgggggctcttccaattactttgatgccaccggccagcggcagatggtcctcatcgtatgctctcggcggccactccactttgatcttcttctccatggtcaattttttctggatatatgtgatatacctattatttttttctagattcgtagaattgggatatatcacatcgatatatttttggacggaggaagtagcttatgttggctcaattgtattaattatgtgctctacttttgctgttgcggcagccacgtcgtgccccgttagctctcaggtcccacccacctgtcacctctaggagcaaccacgtggaaaatagattcgggtagggcctgagattgggcccacggcaaaccagcgtagccactgctgtcagatggagcgacggccactgtacgtgacagagacattccgtaccacacatgcgtagtactccctacaagagtggccgccgccgccaaaaccctccggtacgtgcaccgccgtgatttctctccggtaagtccaacctcttccgccggagttttaccgccggccagctcgtgtgtggcctcttccgctcttcaagaggttgtgcttaattttttacacgacatcttgcttaatttttttccagctttaataaatcctatgatgagttttgatcggacgaccgatccaccgccctttgtgtgctttcgggtgggtgggcctttttagtacgaatccttccgtttttgggaagatctcttcgaaatgcttagccaatctgtcggcttcagcatccgtttttttttttcatttattttttttcctattttcccgctaggagcgacagatggggtcgactgataggtcgaattgttgcttttcggacacagatcgggagttagccacctttttgtaacactgatcactgatttagatgaagtttgttacgggcttcaaggtgcatagctccatgaatcaaacgtggcgtgatgcatatatgtgtgtgtgcgatttatgattttctcaggcatattgattcatcttttctaaaataaataaacatatgtatggtgtgtttgattatgtatataaaaaagtataagactcacaagcatacgcatgtactagaacggatgagtgatactgtttatgagaacttgatgcacccttatgtgtgtggcttcgttgtaatggaaaaaaaatatatggaagaaaatccagaggtgcaattgttgctttcgaacattcattaattgtgtgtctgtttcttagaacggatgcgtaatgctgtttatatttctaactgaatgtagtggttgatcctgttttgcacatcctattttggtacatcatgcttcttgtatgtaagtcaaactaatgcaatgcatcaatcttgcccaccgtacagtgggactcggatcctctgcattgctgttgctactgcagaggagcatttttgtgcattagctcaaatccgagccatccatccaagcaaggacggttgcgtacttctagcaaaactctagctctttctgctctcaaccatcaaatcaattgtctgttcacactttatgtcttcatggcttcattctatcaaatttatctgttcatactctattgtggtgatcttaaaaatgatgtcatggggttgcacatcactgtactcacggtaataactgagttctagagagtgatttctaactgtaactttttcgttctctatgagtatgtttctcgttatcaaaagtttataataatatttagcaacatctataacactaaattagtgacattaaaactatcatttattatatgttaataatatatttgttttgtgttaaaaatattattgttttttctgtaaactttgtcaaacttaacaagtttggttagtgacttataatatgaaacggggagtagttaattgattatgcgttaatgacttgtctcgttttacgtgtcactaaaatactaatctcaatcgctccttcggacatgactatttttaattatttaatttactataaacttttatatagaaatatttttcatataacatacggtttaactgttcgggaagcgtgctaacggaaaataaagaagttaccgcttagaaatttttccacaagtagatgtttggaatagacgggtaagttattaagccaacaaaggcaagggaggtccgtcacaacaagatgaccatgagcgagatgaccatgagcatagatatgaactgatgaccatgagcataggaggcagagctaatgtatatgtcacaagagaagtggaagtatggaagagattgaagcaagaagaaatcacagccatttcttttggatgaacggcctagatttgagctaatgcacaaaacatgcttctctgcagtagcaacagcaatgaagaggatccgagtcccgtacagtgccatcctaaatttcctcttgtaggccttgttcggttaatccccaaaatgaaaggattgaaagggatttatcccacacctattatagtgtgaaattattctcctttaatcccctccaaaccgaataatgccttagcgaattatctatgtggggttctcgattatataatgtggcaatgcatttggatgctttgccacaccaagtcaatcttgtcagtgagaggtttcttcacatggtggtacagttatagggacttgaccctacccaatagagactaaaatattgatttgatgtccatatcgatggacaaatttatccatggcttatatgtgtaaggtgtgtattacttactccttccaaatcgatcatcatataatggaattcaaaatttcttaaattaattatcatataaccgaatggatacagatttcatcagaatacaattaatgtagcatgagagaatgtgtacatgctaaggtgtgattgacatggtgttttaatcgatacatgcattgtcggaaaatatgtgcatgatgtcttgattgatatgatttaaattatccttagtcttcgtgcataaatatatatgatgatcaatttgaaaaggagagagtactagctccgttaaaaaaaaaattgtaagttggctatgcatctagccagaattatatgcttttcgggatggagatagacagatagtaagtggcatatttatggacctctgtcgactgttttcttcaacctctaattttaacctgatccattatttagtacgtgatgtctcaatatgtccactgagttcattgcttggtagtgaagagtaattgtattgttcatcaattcattcttttaatattgtcattagtatccaatgcttcttgaaactaattgacctgtgctacttttttttgtttacttgaacagcaaaatgcatcaaatcagttacgagaagtacatgcacgatgaggaattcaaaccactcacccaatataaggaggctgaaccaattatggacaacatcatgactgaaaaagccaagcttgtcagtagagcacttctcatagagctgtatttcctccacaaaatgggaaagtgcccacagcattttgatgaatcaaatgtctttatcagagaagatgggatagcagaaataagagaatgtaatcttgatgacaagagcgactccaaggtatttgaaaactaccaggatgctcacaaaataattgtggaaatagtgttgcaacaacacaaggatgatatacctaaagatgtgaagcatctcctaaacttgatgaacaatcctaataaggctattagtatggagttggagtatctcatctgtacacatgcttctcttgtccctctaaggaacagggaaacatttttcctgtggatgtatagacacatcatgtttatgctaccttgtgacaaaccagcaggggatatgccatacaaatcttattggcacaagaaactgaaaggggataatctcctcaaaaaattgttcaggcgggagaaagatatgtgctacaaaaaggaaatcactgactttctgaagtcctacaggaatgcaattgttcatggcacggacaaatacggtgaggaaaggataaggtacactccagatgacattcaactaatcctgttgattaccttcccaatgttgctgccaaggatgcaagaagagctttgggaaaacaaacagttggaagatttgcaacttgatagtctatttggatccaacatggacaaggagtttggtgtgatcatggatccttcagctgtttcaaattgcaacaaaagcaacaatttttccttttaggttggatcaatgcctatatcggcgaatcaagacacgaacaagaatgacattggtgttgattcattgcccacaaagagaggagtcgtgttcccgtttcggtaactccttcacccttttctttacagctcgttcactatatattgtaacatccaaaattacctatagtaatatcctctcgattatgtcatggcaatagatttggatgttttattacagtcaatttggtcataaggaaagcacgttgatgtggttcaagccctggttccacaattacacaaagatttaatgagataatgatagagctcttcttataacagcttttaagccagagctgcttgtgtagctagctataactaaaaatcctctagatgtggcttctaatcaaaagtaaaattctctcacaagtatgttcaatgcctcaatcctttggctccatttgttaagcttgtgttacatactgtgctaaaggggcacttaaacaaacatgtgcggtgtgcgcgtgtgcacatcctccgtgtaatagagagaagtttggtgccaccttttacagtcctaattttgtactgatgcttaattatgtccattgattcttctacaatttcacttaatttggcaataatgattgaccaagttgagctattccccatgttctatatattacaaaccaagtggtgtttgcatgcagggaaatttaacgtgaaagatttattaaatttactaatagtggaatggggcatatcttgtgcacatagcataagtgctccaaattatattttgttgtttagaagttttttaaagaaaaaaaaatcctagatataggggtgaacatattctgtattcataaaaaatgtccatactaggtcaacttcaattgctagattcggaaatacttaataaactgtgataagttgattattcacttgatatttgtttttatttgtccaatttatttgagtttggcctggattttttgatgaagaatacatgcagtcctagctctaatctaaacaatcagtcacaatagaaattctttacgtgcataacgattggacagactagtatgtataaaatgcaactctttgtcaatttttcatattagtaatgaagagtaacagtaacgtccatcatttccctttcctactgtaatttctactcctatgcttctaaaattttactatatgttcaattcgtatgtgttttctgcaaactcttgatatctatttgaccattgcttcttttgtaccaaaacagaaacacacatcatgtcagttatgcggagtacatacgtgatctggaatttaagccacttatcgaatatatcaagcatacaccagttatgcttgttggtccaacgcgtcaaagggtatatcgcctcatgactgaggaagccaaatttgtcatcagagcactacttaaagagctatatttcctgcacaaaagggggaagtgtccacggaattttgatgaatcaaatgtttttatcagagaagatgggatagtgcaattaagaggaagcgaacttgatgacaagaacgactctttggtatctaaaaactacaaggatgctggcaaaataattatggaaatagtgtttggacaacacaaggaggatatacctgaagacgtgatgcatctcctaaacttaatgaacactggggacaaggttattagtatggatttggagtatcttatctgtacacatgcttctctagtccctctaaggaacagagaagcatttttcctgtggatgtatgcattcatcatgtttgtgctaccttgtgataaatcaacagagaaagacgaaatcatcaatgctttgcgaaagcttgattggggaggcaaactgcaaggtactagtctgttaaggaaattttcctggtgcaagagagatggatccgaggaagaaattgattcctttctgaattcctacagggatacaatttatcatggcatggacgagtgcaacggcaacgggaaaaggtacactccagatgacattcagttaatcttgtgggttaccttcccaatgttgctgccaactatgcagcaaaagctttggaagaaaaaacagttgagagatttgaaacttgatggtctattcggatcaaccttacaaaatgtgtttcatgtgaccagctgttttatatggtaataaaatcaaactttctgatcaagttggaccaatgtgcatctctcatctctgtgaatcaagacaagcagaggaatggtgctgctgctatcttgagccaaggggatggttattacagttgatttattgcccaagaagaaaggacgggggctgggccgctggggagctatcatggtcagttccatgcctgtggaaattaatttggcgtgatcctagaagggtttatttgcatggttgatgattggctttttcgaagccttcaattatcttctcatcatttgagattgatttgatgcatgggtggatggtttaactcttttcagctgctaagatatgatttgccatcttctacaacaagatcctcttcggttactacttattgttgtaagttgtatagttgagttttgctgtgctgtcgattgagctgggagcatatatacataacttcttctggttgctatctgagacatacacacacacacacacaaacttgttgaattacttggtgtagccgaagttatacaactgcagcctatatatacatgtacagttgttcaatggaagatttggaacatacatacaagtacattattggttactttgcattggaatgcaataataagaactaaagtatgctactagcgccgacaaaaagatgaccaaaactagggtactcatcaccggtgctcttcgttggtttgccaaaggtgcttgggaaggaaaattacctaagatatttgaaacttcatacttactttttttagatgaagtttcatggtctgttttgagctgttctacactaaatccgctgtaattcttagtatagccatgcaatttgcagaggatatgtttcacttttatttctgctatactttagagcataatgttttgaatggatctgtatgtagtaagtgataatttgctcataatgtccttgccattaaacatacaatataatcccttggcatgggctctaatattctttctggtattattaatttctactaccacaatattatttgtctcatgtcttattttatgaatactatttctcaaaatgtataatttaagtatgccctcttagtgcaaggaaaagagctttccccttgaataaatgttgtaagtagtgttgtacattgcaagaaatgatgcattctgtaaaactaaaaatatggccttttctgatatgaaaatgaacttcaattatatatatctaacattctaactagttgtctgacctgagaaatatataatccccttctttttgtaggtttccttcgataaatatctcgagtatgttatctgtcatacaaactcctatacaatccattttgctccctagcttatctgtaatcaagatatatcctttggatgtttaattatggttatgcctctattaccggtcgtgctgagggagtggaagggggttgggtgagcagtgcaagccagaatgctggtggtaggtagatttttctcttttatataggatagcaaagttgggtaaataactgaaacaaatactacctaaaaaccctgaagacccttaggacaattttgagaggtttgctagaagctaccacaagggggctatgtagggtaaaacagttgagagtttcataaatcgaaaatgcatcagaactgaaccgttagcattgactagaaatggcatcagctctgacggtgcatttcagcacgttgaattgaattgtgttccagttctactacctcttccctagattaacgaatcaggggaatatacaataatgcggtaaaatggtagtagtaacagataacaacagggaaacagtgagaacctgaacaatccgtagggcagatcaccaagaacctttgccgccggagattgctgtgcctgaccaaacggctggcgtatctgcagacagccgccgcatcggcgctggagaacgtggcaccacaagcagaggcgcggccgagaggaacggcggcaatggaagggacggagaaaacgcggaccggcatcggcggcggcagcgagacggcgaggagcgagatgcgcggaaaaagaaaaagaactagatcgaaactgcagcagagcagaggtcaggggtgttggcccattgccattcacgttatcgggccctccaccgccgacgccaggcaccccaccgcgccgttgtccggcgccgccgccgctgccgccgccatccaggccactactgctgcgccattgttgctgaaaggtgagagaagaggaagagggggagagagggttggagaccggggagaggtaagcaaaaaagttattgacaagtgggtcccactgttaactagcaagtcaatggtgaccactagaagccgtttcccaattcatcgaaaaagatgatttagtactacatgtgttacagcgaggcggtatcatgacgaggagggagtgcgaaaaaaaagaatgatttaggctgtgtctagagcagcagggtgaaaaattttggcgtgttatattggatatacggacacatatttgaagtattaaacatagagtaataacaaaataaattatagatttcgtctctaaatttattaaacctaattaactcgccattagcaaatatttattgtagcacaatattgtcaaatcatgacacaattaggtttaaaagattcgtttcgtaatttacacgtaatctgtgtaattagtttttctatatttaatactccatgcatatatcaaatattcgatttgatagggtgaaaagtttctgcgtagaaactaaataaactaaataggtccttagatcgaaactgcagcaaagaggtaagagctattggcccattaccattcatcgtttccatccttctctgagttcgcgagtgatggtaggttgaatggccgaatctcctatgattccaacataaatctcctataattgattagaatttctcttgcatttatttccatagtttctgcaaacaagcccgtatatttatagcaaggacgtgactacacaactagtggtacctggtttgtttaaaccagctaccacttcacctataagagactctatctacctatacttcaaataaaattttctcttaaactactcatccgatcttcgatccgattacaccgttgtattcgtaacaattaaatctttataataagatctcacatgattatattttaataaaaaaaatataaattacttttataataaatctaaattacttttagatttcactaaattacttcttcggcatataaaagtaaatttaataaagcttaaaagtaatttacatatattatagaagtaacttataacaaaaagaaagaactttaatgtcttctaatgtcgtgacaaagttactttcattttgttttaagatacttttataatacatgtaaataccttttagactttattgaatttacttttatatgtctaagaagtaacttagtcaaatataaaagtaacttatatatatatatgataaaagtaacttacgaatataataaaagtaatttacaaatataaatattttttcattgtaatataatcatgtaagatcttgttgtgaagatttaactgtaacgaacataatggtgcaattggattgtagatcggataagtaatttgagagaaaactttataagaaggaagaaaaagacatgcatgtctaagaggaaaaacaagtatggacgtcagcacatgtagcagtacttcttctcacaattcgttcgtcgctggttaacactaaaccgagaagcctctcggtttagattttgccttatagcaaactataattggtagaaattgatcaattatcgtcatgtgcaccaaagttgcacattttctccaacaaaatactatttagtcatgaaccaacacgtctcccttgtaggaaataagtaagcatcctaataaaaattgggcgaatagctaatttagtctctcaaatttcacgaaggcttaatttggtcctccaggtttcattttgtccacataagtcctctaagtatttgttttggcttaaaatcgtccttggatccacttaatatgccatatggctatttctagtcaaaatttctattgcaaaatatcccttttgcccttcatttgtatacaactatacaatagaaaagagaaaaccaagatgaataaacaacattgcagatgtattttatattatttcaacatgtgcacatgaaacttaagcaatggctatcgtatacacttgcaagtacataacttattttcgttttatgtaaattactatacattatctataaaaaaattcattgcatgcaattttttcttttatacatgtgaatgagggggtataagtgtcatttatcaagagagttattagttatgtttagccatgtggcttctaagtaggttcaaggataagttcaaggataagggctaatatggatagattgaaatatcaaggactaaactgagtctcagatgaaacttggagaccactttagctattcacccataataatttataaaacacgcgccacggtatatagatggccaaatgggccgcccggcccggtacggccaggcacggccgtgcttgggccgaggtcagtcagggcggcacgacccgacctacatttcgggtggtgccgtgccagcccacaggctgcacacacggtccaggcacaacccaataagactcgagccgtgccgggtcggcccgaaggcacgacagcccatcgagctgactcctcaacatcatgcaatattgcttgtagaagatcgtgattgacatcaaccatttcaccgcccaacagagaaggaacaaacatgtcagcttcatcttctttctgattttgaccactactcgctgcatctgcaatattgattgattcttgctctgcatgcttcgtccaacatgtgtagcccttcacgaatccttgacgtatcatatgacagtatatatctactctgctatcaacatcttctcatttttgcaatctggacatggacaagtcgtgtcatcacaagtcatgtcatcattgttccttcttttcctcttctccgccacgtttataaaatttgcaatgccacttctatactctttgctatgtcgatcaatttcgtacatctaatatcggtccatggctacaaaagtgaacaaatattagatatgatttttaaatgacatgtattacaaaatttgtagggatgatttattttttccatacattagtagactttttctatattttctgtttttctttttttttaaaaaaggcaaaatttgcccacctacacgtctcaccacaaatgtgaccagtacgtttggttgggataaccattccacgaattggttggggtatttatagtgtgtaatatcgataacagtcaataactagggatcgcaaaaaaccgtactcatcggtgacagagtttaacatatatctttgtcgggcctattgttgggctcgccaacgatgacactcatcggtgatggcgttaggttgtggcccgtcaatgattatctttgttgggcgataacctctccccgtcacttatgagtgtcattagtgatgggcccagcctaaaggcctatggaaattgtctgcaagggtgtttatgtgtcgttgtttaatctggtcagatagggatgtgacggttcgtaaggccctgacacggatagactgttcacgatgtcaagttctgtagtagtgaatgtataccgcgttcgactactttgatgtggcagtttcctgtagaatatttgaggaagtactacatatatttatataacattactttttgacaattataattccttgcacatgtggaccttgttgtggaaactttgttggtgttgcccgcagtgtaaaatgcaattatatgaaatgcaaattctgtagtaccgtacaattgttatggtgctaggctgctagctagaagagctattatgctttattactaattgaaaagaaacaactcgtattaataagcggctatacagaaagcacaattccacaagcgtagaactgttagcatcttctaactaactgaatgacgagaaataaacaattcgttgaaaacaaacaaagatgcccttcaagtgaaacattgaaagcaaaaacagatttagtagagaattacatgagcctgttttcattcaactctcactagtttcacaatattgggtatatttcaaagaaatagactactgctgtttggaaggccaaaactaatgctccggaaatctcaccttcttcctcccgaaacccttcttctcccaaacacacagtgcttcccaccgaaagcttccctctgcccccaattgccaatcttaaccctaatccgcagcgcttcctaaggcagggtcacgttgtgcaagttgggggtgacttctgcatcccgcgggttgacctcactgtcccgcagcgccctgctcggaaccatgaagacttctgtgtggccattgttgagccaatccccctggagcaggactgggatcatcatcgggccctcattgccaacttcatacaagataagctacactatgaggttcgtaacagcttccggcacccgtttgcagaaggtttcttccagatgaggtctgctatgaatagggatgctctggtcctctccccgcctgagttctatgatggggttcacttggttacttttgttaatcatgacaaaggtttaattggagggcggctaacttccatagagagggttggttcatgtttctagattttccactcgatttcaatgatcgccatcatgtgcacctggtagttgcctcttttggttagttaaccttttaggcggatgcagatagaatattgggaagggtttttgttagggcaaagaacagggaccaggattctgttccgagaaagattgttctctttgatcctcttggcgctgggggtgtgggggggggggaatcttggacaatcttggttttcatgctagaaggggatttgattaatttccccactgaagaggatcttccccctgctggtccgcagccgggccctgatgatgcagttgatgaggatcctgatgatggtaatgtctggcagtttggcaaccctggaaaccagggagctggaggttgggacgaagcagtgcagcaacaacaggctgcaaatgaacagcaagaagatgcctggggccaagaccatccaatgggtcagattgaagaaaaccctggtcagcttattttgcctcagcagatagccacacctctctcatcagccaggaaggaaacagtccaggatcctatcttggacccacaagtacaggaattcttagctcggctgaacagaattgctaggaatgaagctccaaggcacccctacttttatccaatgaaaggcatattagacaagattgactttctctgtaaagcaaagggcatcatgcagattttgatccaggacaagcctatccctgctgctttgagaatggccaatcccttctcaactttggtcctgccaaggaattgattcctctccctcagtgggccaacatgaatctgaatgggctttacaacctttcaagtccatttctcctcctctgccggaaagggtgattgaggatgttctaccaatcagtgtaatgccccactctagcccaatcaatgtggcccttgttgccctgcttccccccaaggcacctataaagaagaaagatgggaagaccattctttacagtccttacagaagacaaagctctaggctactgcaagacaaggcaaccaaagatttgcagatggatccaagaatgggtattgggaagccaaggggcaggtttgctaaaaagcttaaggaatttgcaggtatttcaaaactctttattgatagcagtttgcaggagtctgatttcaatgaaacttcttatagtgatatgaactctgactcctctccacctgattgttcacttttggtcatacaaaagatgggggtagacatgtgcgggctctctcctgaggaggtggcagaatccagcctaggggggggggcaaaagaagacagaagataaccaggccaaacatggaggataaataatgacagaagactcagttttattgacagacctgtgttttccttttatcatgctcaaggggtctgtaatttgtttactgtcaaagttattttatcagatatttgtcctgtcagactgccaagacttgtgtgtatggcttttggtttgtttttcggttagttgtgctagccttggtacttttgcccctccctcaatggtgtgataatgaatagtaattttaaatcttggaatgttttgtgctggaacaagagggatatgaatgctgaaaataagttactgtctaggcagaaaattgaagacagtggctgccaggtcttatgccttcaagaaactaaaaaggaaaactttgagctttttgacatcaagaaatttgcccccaagcgcttcggctctattgcttttgccccctccatgagtgcatcaggtggaattcttattgtttaggcctcaagagtcttcaatgggtcacccaaagaagttaaccctttctctgtgactgtggagttaacttctagattcacctcccaagtatggtccttgacttgtgtgtatggtccatgtaatggccccaaaagatcagattttgtgacctggtttaaaaatatccagattgatgctcaacagaactggctttttctaggggacttcaatttctacagatttatctatgacaagaataaagtgggagctaacatgaatgatattttaattttcaatgagattattagttccctgggtttgcttgaaatccctttaaaagggagaaggttcacctggagcaatatgcaacaaaatcatttgctagaaagacttgattgggttttcacctctgcatcctggactttaaccttccccaatacaactgttctccctctaactaggaatatctctgaccatgtaccatgtgtagtaaagattgatacgaaaattcctaagtccccaattttcagatttgaaaatttctgggttgaagcacaaggcttttttgaggtggttcagcaagtttggatgctagatcctggttttcatgatcctgcaaaatatatctcctacaaattaaaaattctgaggaagaaactgaagctttggagtaaaaatttgtccagaatcgtgcttctcttgagtaactctaataaagtaattgattttattgatcttctggaagaagagagatgcatttctttaattgaatggaatttcagggaggtagttaaacattgtatcttaaaacttctggaattcaggaaaatatattggaaaaaacgatgtactaatagatggatgatgctgggagaagaaaacaccaagtccttccaatctattgccacagaaaggtacagaataaacacggtttcacaaattttgaatcaaaatggttagatagtttatctgcatgatcaaaaggcaaatctgttctatcagagtttcaagaataggatgggtatctcttgcttcccaacaatggattttaacttgaatgagctttttgttcctagaacagatttggagtgcttgattgacatgttttgcacacaatagattgatagtctcatcgctataatcccagcagataatgcacctggcccagatggtttcaatggttttttcatgaaaaaacgctagcacatcattgcacatgacttctacagacttgcggctcattttcatgttgaatctacagatttacagattctgaataattcttacatcaccattgtgccaaaaaaaaacttctccagaaacagttaatgatttcaggccaatttctctaatgggtttgagccttaagttccttaccaaattgatggctgatagattgcaaggtgtgattctcaaagtggttagtgaaaaccaatatggattcatcaaggggaggaccattcaggattgtttggcatgggcttttgagtatattcatcaatgccaacaatcaaaaagagaaataatcatcctcaagttagactttgaaaaagcttttgatacaattgaacacacaaccatcttatctgtgatgcacagcatggtgttcccacaaaagtggcttaattgggtgcaaatgattttctcctcggcaagctctgcagttctgttgaatggggttcctggtatttcttttatctgcaagagaggagttaggcagggagatcctttatctccacttctttttgttctaggggctgaactcttgcaaagaacagtaaatagggctttcaatcttggattaatttcaaagccaatcaatgaaaatgatggcagtgggttccccatcatccaatatgctgatgacactttgatcctgctaaaagcttcacaaaaggaaatcttttgcttcaaggcactactaaatatgtttgctcaatcgattggcctaaaagttaattatgcaaaatccagtctttatcccctcaatctctctgaagaaaaggcagatctaattgcaggtcttctggatgttttgttggaaaactgcctttcacttatctgggactccccctaggaactacaaggccaagagtgattgattttgcccccctggtagatagagtggaaagaatgctgacaacaagctcaatgttcttaccccaagggggtagactaactttaataaactctgtgttatcatcaatacctacatattacatgtgctccctacaattacctgtcactgttatcaaggccatagatactgcaagaaagaattgtctttggagaggaaatagccctgattccaccagaaaatctttggcctcatgggaaaaagtttgtacaccaaaagaaaaggggggcctgggtgtgattaatctaaaaatccaaaatgcagccttgctcatgaaacatcttgttaaagtttactctacagctgatatttcttgggttaatcttgtggctaagtcttacctggtaactaaagtccctcatctaacaaacaaagactctttttggttgaaagacattattgttctggttgatgtttttagagaaattgcaaaatgcaacataaggacaggcactacagctctattctggacagatctgtggaatgatcaattcaaatgtcagcaatatcatcacctttatgcttcatctctatataaaaatgatttggtacaatctatgtgtcccaggccattggaggattctttcatgttaccactctcttatcaagcctattgtgagtatctcaaccttcaagaagaactaacccaccttcacttggaacaaggaaggtgagattcatggagtttcatttggaataacagctgttttacccctaaacgattatataaacttaattttgctgccattcaagcacccagatctctgatctggatttggaagaccaagtgtgtaatgaaaataaaagtcttcgcttggttattcttctaggacagactgaacacaagagatatgttggataggaggcattgtgccaaagaagatgatgatctatcatgtgtactgtgcaacactaaccaaagggaaaccagatatcatctcttcttcaactgtccatttagcactgcttgttggcagtttctgggaatctcatggaatgccaatcttgaattttaccaaaggacagcttacacaagatggcagttcaatcagcctggctttctagaaatcttcttcgtggctgcttggcacatctgaaaacaacgaaatggcctcatcttcagaaatttgtagccaaccttacaatcttggaagtctctctttataaataaaattcttctgcatctctgcagaatgaaggatcccctcaagcaaactgttgttaattggttacaatctttatagagccttttcattttctcttgttttttgtcacgccctgaagtttccccctctccttgctttaaaaattggctaaataaattgctcgaagaaattatcttaattaacctagagctaaattcctaattaataaaggcatttaataattggaattggcaatgtgggattttccttgagttcaacatgtcacaatacattaacaggatttttagtggaattttcagagccttggaaataattttaaccaattaaaaatcaccaaagtgcaatttttaatcccaggaaaatcctttttctctttttcttttcttttccctctttttttctttgttgggctgtcggcccatccctctcccgcggcccctcctccttgtgggccggcccaagccgcccctccctcctctctcgggacgccgacaggtgggccctacctgtcggtcgtctcctacatccgggaaccgccgctgccgtcgaaaccgcccacgccgccgccgccgtttcccgccgttctccgcgccccactccgcccgtgctgcgcgcccacgtcgccgccccactcctccgcccttcccgtccgcacgcacgcacgaagtgggcgggattcattttgaatcccaccccactctctctctctcctccccacgttgccggcggtttcggccatctccccggccacgtccgcccctccctcgcccataaaaaccctcccccgagtcccctccctcgtttcccccatttgccgtcctctcccacgccctctaccgcgcccgcgccgtcacacccgagctccgccgcttgccgccgccttcggccgcgcgccgccgccgctagagtcgccgccgcgccaaaccgccgccgccgttagcttcgccgccacaagagctttcccggccgccgcctcgcgtcgccggaatcccaccggagcgcctctctcctcgcgagccggtgagttttttccctcccctccatctccggccggcaatggtagccgccgtggtcgtcgtctcctctcctaaccccctctccgctccctcccaggtgtcgccgccgcccgtccgcgcctcggcatcgtcggtcgtcaccgccacccttgttttccgcactggtcgccgccgcctctccggtgaggactccctctccctcccttttctccccttcccgcgtgcgccaccgcctttggccgtgccgccgcctttggccgtgccgccgctccggccgtccgccgccgcctttcgcgccgtccgccgccgcctccctccgccggtcgtcgccgtcggcagccgcgcgcgccgccgccggtcgccatggtcgccggtcggctttgaagccgaaccgagccaaccgggtgccgcccccctcttcccccttgagccactgcccgtggggcccacatgccggcgccccctccctctccccttgtgccgctgacatgcgggccccgcctgtcggcacagctcgcccaccctcactgacgtcaccccccctcactgacatcagccctgggtattattgcgcaataaaataattaaggacttttactttattagtaaaaacacagtttatcttctaaaattcataagtaattcactcgagctccgtttaagtccattcaagtctcagtaaattcataaaaatgcaaagaatctattaaaaatggttttgtttcctgtttcagtagtcttatagcatgttttgcttgtgtgctttgtttgtcgtgtagttttcggccgtttcgtcgatccgcggtttctcgaagacgttgctgaggtctcatcagtgtgagagcaaggcaagtcatgcattacaattgatcatattgtacccaatttacaaatatcccgcatttctattaaatgtcgcattcttttacaatgtcatgtgggatgggtcctattactcagccatttattgtttaccatatgccattgataacttgggtatcaaaatgattagatgttggtttaggaaatgcttagccatgcttagctcaactagtacacaaatggggatcacattattacatagactttggctatgagcatagttttggattggtgtcaccgcaatggtgttagttaattaaaatacactgaatggtgggctgtgggtgcatggttttgctggtcgcacccatgacagttaaggaccggttcacgggaaaccctgggagacttaccgtgcttaccacaagcgggagtgggtaactgcttgatctgaagtatagctcgaccctttcctaggcaccggtggcgagggtgggcgtgatggagttgggtcggccggggtgtccggttgtccagctgctggattcaccgcggcgcaagaggggaccgcccactgccttttgaggggtgggggtgaaaccttagcgtggtgtggatggttaggggagggtcttgtcacgatttccccctttgcagtatcatggtgatacttcggggcatggcgacatgtgtggaatcgtatcttgtgggtacagttgtacacctctagccagagtaaaactattcgaatagccgtgcccgcggttatgggtgatcaaccagattcatcgtgattagtctcacccctagtttagcttaatgaactggtgtagttcaggtggttggttgggcttgttgcaacgtggtgtagcgttggacagtgattggttaatattgattaattactacagctgttttactgctttcaactactgcttttaaatgctagctttgtgcaaaagaacccctagccttctttggttatatcctacatcatacctcctcttccggtatgacttgctgagtacagtgggtagtactcagtcttgctctcttttcccccacaccagagctgaaggtctttctagttggagctgtcttgttgaagttggttttgtcgctgccgtcaaggattgcctgtggagtggagtcgccccgctgctgaagtcaagcttcccggtttagctcgcttttatcttttccgctgcatttgtaatcttttctatttttgtaagacgtggatctgtatgtcaacaattgtcatttatgtaccctggctggtcctggacagggatttaatgcacattcagcttcgaaattctggttcgtgaatttctgggcgtgacaagttggtatcagagccgaccttgaccgtaggacaagccaactggaaacctaagagccctctgaacccctttttcatctgcatatgccttttgcacctggaattgtttcgggaaaatttggagttttgcctctttggtttgcgggaaaaatcttggtcgttcattcggatctgatttttttaaaaaattagctcagtctagagctttagaaaaattttagttggagtttattcgacagtcagtcgggaatctattgggggttatgcattaggtcgtgtctatgttcgatggggcaatgttatgcgcatcattttccatgcatccagtctatgcattaatttattgtttagttgcaattgtgtctttatctgggttcatgaaaaatgttctatgcataaaaatcatcatgttcagttatttgtttgagtcatttgttgcttcgtttaatttggattcgagcatgaattggttcttatcccttgtccatctttagatgtcagtcctatccctcgattgcaagcgccgctccgagcttcagagtcgccgcccttagctttattgtcttcctagttttgtttgcctgctagtttccgtgcataggtttgttgctggtggattagtcggcggtcgatatcatgtgtcagtggtatggttgcctcaattaggagttgtgtgcctctctttcagtgttttaatcacgattaagataattgcacttaaacttataggaaagattagtttctgagccccctgtttttcttccttttctcatatttctacctatccccctccagatggtgaagacaaggaatggttcccgtgactccaacaacgccagtggcagcaaagagcagatcagtggagcatgtgccaacgatgcacctaacagcagttcatccccactgcccgagaacctaacgattgctcaggtgttggacaatcaaactcagatgatgacgatgatgatgcaacagatgcaacagtaccatcaggtgttgcagcaggtgcagcagcaagcacaacagcagcagtagaaactgcagtttggtcttccaccacctcaatccaaactgttagaatttctccgtgtcaagccgcccactttctcaagtaccaccaacccaatcgaggccaacgactggcttcatgctattgagaagaagctgaaccttttgcaatgcaacgaccaagagaaggttgcttttgctacacaccagctgcaaggttccgcttctgtttggtgggacaactacgtggtgacccgtccagctgggacagaggttacttgggcagagttttgtcagagtttcaataaagcacaggttcccgagggaattgtggcacaaaagaagagagagttccattctctgcaacaaggaaccagaacagttatagagtatttgcacgagttcaaccgcctcgcgcgctacgctcctgaggacgtgcgcactaatgccgagaggcaggagaagtttttgtcgggtcttgatgatgaattgaccaaccagttgatctcccgagattatgaggactttcagaagttggtggacaaagctatccgtcaggaggagcagggtaacaaaatgaactgaaaaaggaaggcatctcagtttagaacttcccaggggaacagtcagaagcctcgcttcatgatgggacattagggtggaccttccaccatgattatccggcagcaccgtccctaccacccgggtagcttcggcaggatctaccattgtggcagtcacggcaacagcgagaagcacagcctcaacccgactccaagtccactaatgtttccagctcagtcagtttagccagctctgcctgctcagtcaaaacagcccgaggagttcgaaggaaagcccgaactctgcttcaattgtaacaaaccgggacacacggttggaaagtgcccgaagccaagacatgctggacccaagtttgtgcaggcccgtgtcaatcatgcgtctgcagaggaggcacagtcagcaccagaggtcatattgggcacatttcccgtcaactcgacaccggcagtaatattgtttgattctggtgcaactcattccttcatttccaagcgttttgctggtgcacatgggttatctttagtgaagcttaagatacctatgcgagttcatactcctggaggtggcatgaccacaactcactattgcccgtcagtgagagttgaaatccaagggttgatttttccagccaacctcattcttctcgaatctaaggatctagatgttattctgggaatggattggctaacaaggcacagaggagtgatcgattgcactagcctcaccatcaagttgaccaatgcgaagggagaagtggttaccttccagtctccagtgccacagaagccagggatcagtctgaaccaggctgctattgaagaacaagaggtagcagtggagaaaaccactaagaagttggaagatattcccatagttagagagtatccagaggttttttcggacgatctgacaacaatgccaccaaaaagggatatcgagttccggattgacttggtacctggaactgcaccgatccacaagaggccttatagaatgggagccaacgagttggtggaagtcaagaagcaagttgatgaacagttacagaagggatacattcgcccgagcacgttgccttggggtgctccagttatctttgtggaaaagaaagataaaaccaaaaggatgtgcgtcgactactgcgcactcaatgaggtcactattaagaacaagtatccgttgctaagaattgatgatctgtttgatcagttgaaaggagctactgtgttctctaagatagacctacgatcaggctatcaccagttgaggatccgcgaagaggatattccaaagacagcattcatcactcggtacgggttgttcgaatgcacagttatgtctttcggactcactaatgcacctgcttttttcatgaatttgatgaacaaggtgtttatggaatttctaaacaagtttgtcatggttttcattgatgacatacttatctactccaagttcgaggaagaacatgtgcagcatctccggctaatacttgaaaagttaaaagagcaccagctgtatgccaagttcagcaagtgtgacttctggcttaaggaagttcagtttctcggtcacatcgtgaatgctcaaggagtagctgtggatccagcaaatgtggagtcagttaccaaatggaccctaccaaggacagtcactcaggttcggagtttcttaggatttgcgggctattaccgccggttcattgagaacttctctaaaattgctaagccaatgacacagctattgaagaaggaagaaaagtttatctggtctgcagaatgcaataggagttttgaagaactcaaacgacggttggtgtctgcaccagtcttaatcctgcctgatcagacgaaagatttccaggtctattgtgatgcatctcgccaggggctaggatgtgtgttgatgcaggatggcaaagtggtttcttatgcttcacggcaattgcgtcctcatgaaggcaactacccgacgcatgatctggaattggccgcagtagttcatgctttaaagctttggcggcactatctcatcggtaaccgttgtgaggtatatacagatcaacaaaagtctaaagtacatcttcactcaacctgatttgaatctcagacagcgaagatggttggagctgatcaaggattatgatatgggaatacattatcatcccggcaaggctaatgtggttgcagatgccttgagcaggaagagctactgcaatgttgcatgggtagagcaactatgttgtgaggttcaacgcgatttggaacatctgaaccttggtatagttgagcacggattcgtggctactctagaggcacagcccacactggtggagcaggttcgcatagctcaagcaagtgatcctgaaatagcagagctcaaaaagaacatgagagttggaaaagcccgaggttttgttgaagatgaacaaggaacaatctagatggggagaagattgtgtgtacctgaaaacaaggagttaaaggacttgataatgacagaagctcagcaaactcagtattccattcatcctggcagtaccaagatgtaccaagacctcaaagaaaaattctggtgggtcagcatgagaagggaaatagctgaattcgtcgcactctgtgatgtttgccagcgagtaaaggcagaacaccaaaggccggcaggtttgctacagccacttcagattccagaatggaagtgggaagaaatcggaatggatttcattacgggtttgcccaggacatcatcggggcatgattctatttgggtagtcgttgatcgactcactaaagtggctcacttcattccggtgcatactacctactcagggaagaagttagcagagctttatttggcaagaatcatgtgtctacatggtgtacctaagaagatcgtgtctgatcgaggaagccaattcacctcaaagttctggcagaaattgcaagaagaattgggaacccgtctgaacttcagcactgcttaccatccacaaactgatggccagaccgagcgagttaatcaaatattggaggatatgttgagagcatgtgcccttgactttggtggagcatgggacaaaagcttgccgtatactgagttctcctacaacaacagttaccaggctagtctgcagatggcaccgtttgaagcactgtatggacggaggtgtcgtactccgctcttctaggatcagacaggggaacaccagttgtttggtacagaagttttaaatgaggcagaagagaaagtcagagctgtcagggaaagattgagaatcgcgcaatctcgacaaagaagctatgcagacaaccgccgaagggagctcgttttccaagcaggggattatgtgtatctccgtgtcactccgctcaggggagtacaccgcttccaaaccaaaggaaagttggcaccacgctttgtgggaccatatcggattttggaacgcaggggtgaagttgcttaccagcttgagcttccctccaacatgcttggcatccacaatgtgttccacgtctctcagttgaagaaatgtttgagagttcctgaggaacaggcaagtccggatcaaatcgaaatccaagaagacttgacgtatgcggagaagccgactcgtatcctcgaaaccagcgagagaaggactagaaacaaagtaatcagattctgcaaggttcagtggagtcatcactcagaagaagaggccacctgggaaagagaagatgagttgaaggccgcccatccgcacctcttcgccagctcttccgaatctcggggtcgagattccgtttaaggggggtaggtttgtcacgccctaaagtttccccctctccttgctttaaaaattggctaaataaattgctcgaagaaattatcttaattaacctagagctaaatccctaattaataaaggcatttaataattggaattggcaatgtgggattttccttgagttcaacatgtcacaatacattaacaggatttttagtggaattttcagagccttggaaataattttaaccaattaaaaatcaccaaagtgcaatttttaatcctaggaaaatcctttttctctttttcttttcttttccctctttttttctttgttgggccgtcggcccatccctctcccgcggcccctcctccttgtgggccggcccaagccgcccctccctcctctctcgggacgccgacaggtgggccccacctgtcggtcgtctcctacctccgggaaccgccgctgccgtcgaaaccgcccacgccgccgccgccgtttcccgccgttctccgagccccactccgcccgtgccgcgcgcccacgtcgctgccccactcctccgccctccccgtccgcacgcacgaagtgggcaggattcattttgaatcccaccccactctctttctctcctctccacgtcgccggcggtttcagccatctccccggccacatccgcccctccctcgcccataaaaaccctcccccgagtcccctccctcgtttcccccatttgccgtcctctcccacgcccccaaccgcgcccgcgccgtcacacccgagcttcgccgcttgccgccgccttcggccgcgcgccgccgccaccgttagcttcgccgccgcaagagctttcccggccgccgcctcgcgtcgccggaatcccaccggagcgcctctcccctcgcgagccggtgagttttttccctcccctccatctccggctggcaatggtagccgccgtggtcgtcgtctcctctcctaaccccctctccgctccctcccaggtgtcgccgccgctcgtccgcgcctcggcatcgtcggtcgtcatcgccacccttgttttccgcactggtcgccgccgcccctctggtgaggactccctctccctcccttttctccccttcccgcgtgcgccgccgcctttggccgtgccgccgcttcggccgtccgccgccgcctccctccgccggtcgtcgccgtcggcagccgcgcacgccaccgccggtcgccatggtctccgctcggctttgaagccgagctgagccaaccgggtgccacccccctcttcccccttgagccattgcccgtggggcccacatgccggcgccccctccctctccccttgtgccgctgacatgcgggccccgcctgtcggcgcagcccgcccccccctcactgacgtcagccctgggtattattgcgcaagaaaataattaaggactttttctttattagtaaaaacacagtttatcttctaaaattcataagtaattcacctgagctccgtttaagtccattcaagtctcagtaaattcataaaaatgcaaagaatccattaaaaatggttttgtttcctgtttcagtagtcttatagcatgttttgcttgtgtgctttgtttatcgcgtagttttcggccgtttcgtcgatctgcggtttctcgaagacgttgctgaggtctcatcagtgcgagagcaaggcaagtcatgcattataattgatcatattgtacccaatttacaaagcataaaattgcaatgtatgtttatgttggcaacttttttttgacaagaagaaaattacgatcgggacacctaaagctttgtggtgatatggagtcgtcaaccaccccgatctagcaaaagctaaatcaagatgggttttgtagaaaaaagctaaatcggctagcggagtagatttagagatcaaaatcagactctagaccgatttagatcgatatgaggataactacccgtctcgtgggcaaacggaaggtttacgggataaacctacaaaggggtattgcactctcgtagtgatcatgggcgaatcgataaagatggactaaactagggtaaagttgcaaacattgttgaaaagtaaagttaaaagaacgattcaatagattgtagggactgtggtctgttttgaatcgaacaggccttagcccttataaaggggttgggttgatctagcattctataggtcctcctccatgtctagaggaccacgtccaactaagggtagaaaacaatggaaactcaaaaaatacatttccaagcaaggaaatccgagacccgatgaaaatcagctcagactcggactctaccggtctggtcgaacacatgccaccagtcaaaccggccctacacgctggtcagaccagccccgtgaaggaaacccgacgccttccatattttggcagattccctatttcgactctaggtgccaaatttgagtgtaaaacacatgcccccactgcctttttgatgaacttatgactaaaagcatagaatatgtagaattagggcgataatctaattactggccatacgggattccaagtgcctagtaaatcgttctctttgttttttcctaacaaatcaacgatcttctaagaacgattcatactactcagtacagacattcccaactagatgattacccaaaaagcactttacacttaaaccctgacgataaaatgtcaagtccttaatcttgaaatgatttcactctaattataaactttggatatcctctcttttcatctttcaagtaccttccaaagtcttccaacatttatcagtcgttttatcattattattctattgtagttgatagttgttactattcaatagtacatggagagaatattactgcataactgaacttgttatattgagcgtccgctctcggggatgatacatagaggttatatgggtagagataaggaaggatctttcttagagatatgaagactatgatacaaatcaattctattccaatataattctaactaccatataatctaacagtgataaatgaagacaatagaaccaaccaaaccatgagatacacaaatatccctggacctcaatggccctaccctttcaccactttgtaccgccttcctctagtccctacgttgaccttagaaccactcgactttggctcgtgtccttatgttataatgtcaaacacatggttttataatgtttttagactggtttcataatgttatgcttactcaatagtatgttttatattttgcatagttaagctattgatattccaaaaatctaatatagtatttgttttcgattttgaagtgactctctctcatcatcttaatttggtgtcgggatatggtggatccaccgcttgggctcatcggcgttaattacaaataaccagtggaaatagaaatgatgaaaatattccaattgagattataaaatgagtgtgaaccaatttttatgattttattctttttaattagattattgtgggaaattatgtttttctaattaatgtggtaattttaagttttttttcatcctttcaattagtgtggcaacttctatgaggcctaccgatttgtacaaagaaagatttcacttgccaaaagaattggatttcctttgagataaacgttaattttcataaaaataattgatttccccatgcatctttctaaccagggatggacaaacatgggtgttgggggactcgagtccccctactccgttgcccattggatcaccattgataaaagaagagaggggaggggggaagaagagggagaggagaaagagtagggggctgaagaaggaagaaggagacgagtcctccctctaatcttatcctggatccaccccttttccaaccacattataattaaaacattagtatacatcactcgtatgctagtttgatcagcatacaattatattacaatataagatgtcggttagtacttcacaaccgacaaattactaggcacatcaaatgtgcaaaaagccaaacatggtatataacagtacatactcacactttgttggattcgataccatgttttcacctatatagtgttcactggagagggttatttagattaaaattaaatacaccatataattgatcagagcaaattcttagccttgtccaccaccacttccagagccacctcctattgcagaacttgttgatccaaccccactacctcctccgcttccgctactaccaatcacgctaccagaacccccgccgcctcccactgcattcccagcacggccaactccatttcctccaccaaatccacctccgctacttcccgcactttcacctccaccagcaccaccaccaccccctgtgcttatactcactccaccatgacctatatggacaccaacaccgccacctcctcctcctcctgcgtgcacgccaccaccgttaaccgcggcacctcctcccccaccaatccccacatccaccccaccatgacccacatctatgccaacacctccacctgccccaccacccacacttgcgccaccaccacgtgtagtgccggctccacctccaaagccaccgcctataccaattgatatgtcgtgacctccatggctaatactcacaccaaaaccccgcccacctcctgcgccatcgccacctttgatggagaaggccttgctatcattgagggtgtttttatcggaaaggaggagccgcgcgtgcgcaagagggagaagtgagaagcagcacaatagtataactgagatggccagtctgcagggtgtggaagtagccatggggaactgcctgtattattatgcaattgcacgtagctgatccaaggcactaccacggctatatatattcaggaaaagtgagactgaagtgagctgtgccgcacattagcccttgtcgagaaataaagagcaccacatggccaagaaaactgttcggtgtacttgtttagccttatgaatcaaagcttatgatatataaaaagagtaaaaacatgaaattttaaacatatatatatatatatatataccattatatttctgagattataatttcgttggccaatctccatcatattggtgaaattacaaaaaaaaaaatcccatgacaaattgacagtagattaaaaacagtaacaagggatgtacaaattaaagggtttagcttaaactttcataagctatgcacgctgggtagacttggcttataattcggttttgctacaaaaaataagtgtcaacatattctttttacctgatttcaattgttttttttcccaccatctggtgcaagtctgatggtatctccctcatctcatccctcttgatttatgtaggtttccatttttacttgtgtgttactctcctcttcgttataaatataagggattctgagatcgttaaacaatttaagccagataggaacacaattttgtacccctcaaaagacagtggataggttttgattagtgcaagaaacatgattaaagaaggttacccgtgcaattattgatatccatgagttaatatgtggtgtactacctagaatctcttatacgtgtgggcaaaatttggcggtagcgtgtgtgtattcgtaaggggtgtgtatgtgcgtacgtttatgagtgtttgcgtttgttttgtgtttcttatgaaaaaaaattcaaaccttagaatcttaatattatatttgtggatggagggagtaaaataaaagcaagcactcgattttccttttaaggaaagcgggcgatcgaccattttagtgacatttctcctgtatgcaatgagtactcgaaatattacgttgtaaaactggaatttagagagtaaatattgacaaatttgacattttttattagcattatatcaacatagatattgaatatagtagcatataaataagttccactggtggagaaaccatctttcgtcggtcggccgatttccacaatagtcccggatgcaataaaaaccggggctaaagatgatctttagtcccggttcaaaagggtaacgggcatatttgatctttagtcccggtttgtgttaccaaccgggactaaagatcatctttagtcccggttcgaatgctgtcaggacctgtcaggcccccccggatctttagtcccggttggtagcaccaaccgggactaaagatcttaactttagtcccggttggtattaccaaccgggactaaagatcccggtgatctttagccccggttggtgctaccaaccgagactaaagatcttaactttagtcccggttggtaataccaaccgggactaatgatcccggtgatctttagccccggttggtgctaccaaccgggactaaagtcccacccctatatatatgtcttcttcctcctccagctgcccgagcaagcttcaaaatttcttcaaaaaagaggggaggtcatgccaaaatttctattgaatttattttggtgattacatacaaatcggaggtgcctaaaaggtttgcaacttcatcctccaatgtttttttttgtcatactacatttgcacctatgttttgcacacttttttttctccaaaatttagttgtaagttgatgagagagaaaatgtgtgtggggaagaaagaatatatagaaatttagttcatttgctaaacaaggttttataaaatagttgagaaggaaaactctagtgaaagttaatattaaataatagaaaacaaactaaaataaaaattaaaagaagtaaaacacattaaaattagtttaaaactttacaaatagtttttaagaattatttggtgtaatattttataatttttgtatgaataaagatatcttataattattgtatgactgtcattattgtaagaataattatttgtgtgcggtttttttgactcatgtagatggatcggcaatagatgtacgctgaccggcggtccaaagagtttattgacggcgtgcactattttttgagagtggccgaagctaacaggcaaaggggttttatttgttgtccatgcaataagtgtaagaatcagaaggagtattctgcatccaggactattcatttccacttgtttgagtcggggttcatgccaagctataattgttggacatcccacggagagcaaggtgttgaaatggaagaagatgaagtggaagacgacaatattccggactttgctcagtatgttggatttgaaggaaatcaaacgggcgaggaggaaatagctgctgatggtaacgacgttgcggatgatcttggtcagatgttgcaggacgccagggaagactgcgaaagtgaaaaggaggcccataaattggacaagatgttggaggaccacagaacttcgttgtacccaggttgcgagcaggggcacaaaaagttggataccactctggagttattgcaatggaaggcaaaaaatggggttagtgacaaggcatttggcgatttattgaaactcgtcaagaacattcttctggggggaaacaaattgcccgagacaacgtacgaggctaagaagatagtctgcccgttaggactggaagttcataagattcacgcatgtccgaacgattgtatcctatatcgcggtgaggagtatgagaacctagaagcatgtcctgtttgcaaagcactacgatacaagattagacgggacgatccaggagaagttgacgggcagctaacaaagaagagaattcctgctaaggtgatgtggtatttccctataataccacggctaaggcgtttgttcaggaacaaggggaatgctagaatgttgcgatggcacgctgaagagcgtcaacaggacgggatgctgagacaccccgccgatggttcgcagtggcgaaacatcgacagaaaatttaaagaatttggaaaggacgcacgaaacatacggtttggtttgagtacggatggcatgaatccttttggagagatgagcagcggccatagcacttggcccgttacgatgtgtatctacaacctccccccctggctatgcatgaagaggaagtacataatgatgccgattattattcaaggccccaagcaacctggtaacgacatcgacgtgtacctaagaccactggtcgaagatcttaaacagttgtggaagaaggaaggtgtccccgtgtgggacgaggacaaacaggaggagtttaacctacgagcgctgctgttcgtaaccatcaacgattggcctgcacttagcaacctatccggacagtccaacaaggggtacaaggcttcaactcactgtatggatgaaacagaaagtacgtatcttaagcactgtaggaaggttgtatacatgggtcatcgtcgattccttgcagcaaaccacccggtacggaagaaaggcaagcacttcgaacataaggccgaccaccgtacgaagcctaaacatcgcagcgggaaaacagtgtttgctatggttaaagatcttaaagtagtgttcggaaaggggcctggaagccagcatatagagagcgaagatggtcacgcggcgatgtggaaaaagaactctatattttgggagttaccatattgggaattcttggacgtacgccacgcaatcgacgtgatgcacctcactaagaacctttgcgtaaaccttcttggcttcctaggtgtatacggaaagtcgaaagatacactggaagcacgtaatgatctgaagcatatggaacaacgcggcgaccttcacccggaaccaaaggagaaaggaagccattacttgagtccagccagctacactcttagcaaggcagagaaggaaagtatgtttgaatgcttggagagcataaaggtaccgtctggatactccacgaatatcaagcgaataataagcacgaaggagaagaagttcacaaacctaaagtctcatgactgtcacgtgttgatgacacaactgctaccagttgtaataaggggtatccttccagacaatgtccgggcaacaataacaaagctatgtgcattcatgaacgcaatttcgcagaaggtcatcgatccggatagattagaagcccttcagaatgaagtggtgcaatgtctcgtcagttttgagttgatatttccaccttcatttttcaatataatgacgcatctgctttgtcaccttgtgaaagagatccgtattctcgggcctatgtacctacacaacatgtttcctttcgagaggtacatgggcgttctgaagaagtatgttcgtaaccgtgctcgtccagaggcaagcatcgccaagggttatggaacagaggaggtcatcgaattttgcgtagaatttatcgaagaccttcgcccaatcggggtacctgaatcacgccatgaagggagactacggggaaagggaactctcggaaggaaagcaataacgacggtagacaacaatttattccgtaaagcccatttcactgttctgcaacactcttcattggtagctccttacatcgaggagcacttggctctagttcgcgccaggaacatcggtaagtccgatgcatggattacacggcatcacattgatactttccccgcgtggctacgacaacatctcatgggtaacgagtcgatcaaccaacaacttgccttcctggcgaggggaccgtctgggtcgatcgcgacattccagggatatgagatcaatgggtacacattctacacgagagcccaagacatgaagagcacgaaccaaaacagcgctgttcgtgtcgatgccatgggacacgatggaacaactgccacgtattacggtgccatcgaggacatatgggaacttgactatggtcctctcaaggttcctctgttccggtgccaatgggttaggttgactggtggaggcgcaatgattgatgacagtgggatgacaactgttgaccttaacaaggttggatactcggacgaaccttttgtccttgccaatgatgtaacgcaagtctttttcgtgaaggacatgtctagcaaaggaaagaagggcagagggcctgatgagcctaagcgtcaagtggttctcccaggcaaaagaaaaatcgtcggagttgaggacaagactgacgaggattacgatcagttggatgggcaaccccctttcacggtgacgattgaccctagcatcctcctatcaaatgaagacaccccttactcacgcagcgatcacaaggagggaacaatagtgaggagaaagtacgtgccgtaattattgtgtacacgatgtaaactattttggatgtattgattatccatataaatcaattgatgtatggcatatgttaattacgcacgattattagaggtttcaacaagtttaaatcatgtatatgctagttatatgtgatacttacaatttttaaaagttttaaatcacacaggtggcaatttcatatgtatgttaattagagtttttaacatttaatttactagcattcatatgctaattataattgactagaggatttttaaaagttttaaatcacgcaagtggcaatttcatatgttaattagagtttttaacatttaatttactatcattcatatgctaattataattgactggagaatttttaaaagtattaaatttaatatatttttaaaactatcattcatatattagagtttttcacaatttaatttactatctttcatatgctacttatatatgactattcgaatttttaaaatgtttaaatcatgcatgtggcatttacatatgttaattagagtttttagcatttaatttaatataattcctacgctaagtacatatgatgattacaatttttattaattttaaatcatgcagtatgtacattaatatcttaattagagtttttaccaatataataatatcattcatatatatgctaagaatatatatatattggaatttttattaattataagtcatatatttgcttattacgatttatccacttaatttattacagacaaaaataatttttcgaagtaattgtcatcaatctttgtactttaaataatgttaatgcattaacttctattttataaacacatatgtaagcgaaaatcatatgcagtgctataatctttagtcccggttcttaaccctaaccgggtttaaaaagaatttcgaaatagcgggaaaagatatttactcccggttgttgagaacaaccgggactaaagatcttttctttactcccggttgttctcaacaaccgggactaaagatatctttagtcccggttgttgaacaaccgggagtaaagatccaggggtatatatattcccggtgcgccctcgtcttcttcaccaacacttaaacgttttcggccgatcgatctctctcggcctctctccttcgccgccactgcctagggcaaatccccgcgccgacgccgccgtatctcgccgtcgtctcgagctcgtcgtcctcgccgccgcctccgcctcctccgctgccgccgcatctctggggtgagagccgccgcatctcccttcatgcatctcgatctctccgatctcgatcccggccacgtggctgagccatctttagtcccggttggtgttaccaaccgggactaaagatcgatctttactcccggttatttcacccgagactaaagatagcgatctttagtcccggattggtactcccggtttggaaaccgggactaaaggggggttacgaaccgggactacaaagggtttctccaccagtgttcggtgtgcacataacgatttcgtcccgtttcccccggcgaaaaagatttcgttccatgtcacgttcagttatataaagaatatgttgctttgagagatctttagaaaacaagaattcaaccattcacacgtactttgatcgaattatctgtatgcaaaggtccacatgaactttgcagctcatttccatgcctccagatttgcttttctgcggctttcgttaattgctttgcgttaatttgcaggcgtgacagccaagcgaacgtgtttcaggcatctctcgatatcatgaatgatggatccatttgcattatagggcatgtttgctacaatttcagctttacctggagctggagctcagccaaataattttagctccacttaaaataggagcgaagttgggtatagcattctcacaaaataaactatagaggtagctagagctgggtttagattggtttaaaactctctaaaactttattctagacctaactcttaaagctaaatttagaaattagagctctatcaaacagacccatagtatatattattattatacgtggtttcatattattatctgagtacacggttctaagaatataaggccaatactgcgccatgccgctaaaattgcactaaagtagctaggttcagactttgagccaaatagactgaatctgcttcataccaatagtcgaatgatcgaatctcaacactgacacacaaatacagcgagttaaaaattttagttatgaatggtacttacatcgttgataaattaaataaatctgtttgttattgtgaaatttgtaatatatgctaccaatttttttctattttttaattgttttatgactgtttcaaaaacagaaatgttgtgaattgactttttggctttttttttggcacgttccgttgcctagactgttgatcatcaataggcagggaccaaatgatagtatttcttttttttggctttcataactaatgaaaaaggaattcccgtctaataattaaacaaaaaaagaacaccagtatctataaaatagcttcatgtcatccacaataacttgaataggtgtacctctcaatctgcaatccacaatatttaagaaatattattctgactaaagtatagcaaactagataccaatctgtaattccgcaagcaaaactcatgtttgcagcttatgtgaccaatcaagttgaactgtcataagaggtgctagtagtgaaatgaatccctacaatttggtgaaagttttaaccatatttattcattgaatctgaaaagctaaagagaaactccgaaaataaattatatgaaaaaaaaacccgaacttaggggctaggatcagttgtcttcctttggagacagatgctgacaaggcaagctagggttgtaagggtactcatagtactctaacaagggaattaatagatgggtctcagcccattcgaaaattaattctttagaaaatcacaaaagcccacctcatgggatgacaagcataggagtttagtaccacattacttattctacgagaggaagacctccttataagggaggatgctcttctagtcatttgaaacatgtgatgtgaagagaagagggtgaacacaggcgcgtgcttgctcgcctgacatggcgtggcagcgcgtgtgcatgacgttatgcgtcgaatggtccgccaaaaagtggttcttcacccttgcgcagatgcaacctccttttgcacagatgtaacctctttttgcagttttgttttgcacgggaaattcggatttgtttgttttggaaacactccaaaaaatcaggtgcgtgaaaaagcgtagagtccggatagttttgttttgccgtgggaaattcggacttgtttgttttggaaacactccgaaaaatccagtgcgtgaaacatcgtggagtccagataagtttcgcgcgacttatccggtttggttacacggagcagagatcatgtaggcatcctgatcaagcgtcctgatatctctatataagctgagctgccgcctccacgcaacacacacgaaattaatctagggtttgcctcctcctctgtactgcgtcgtcactcgtagtctactccatcccgctcgtcggcgtgcacggcaatcgggagagcaggtcttcggaaccttcgccttcgacgtcctgcaccagaagaaggcagcaatatggtttttgaaagcgcttcgcgtgattgctccctgttcgaccacaacggcttgtcttcctcttcgctcgtgtgctgcgcaccgtcgtcaacacccgcacctgggagtaattcttgctaagtaaccggtcttccggtacccttgttacgtgttcagcatgttgcgcatattcgatttatttatgctttactgtctagtttacatgtgtagatctaatgatgcgttcatgctagtttacatctgcaatgttatgatttatttatgaaataaattaaatcattatgttcttataacttcaacaggtactaggtcgggtatcgttatcagacctggtatcagacttggtactttggtatcagtaggtatcggacttgatacctcgtacctgatgtgatatctagatttcgtgttgatgtcagcatggtgtcatcatataaagtatcgggtggtttaatgagaggaatcccgcatatgctcgagggtatggttaaaaagagcttaggggtatttaatttgttagattcattaaaagttatctcgtgctctagctattctcattaaaaaaaaggtataagttaggcatcctgacctcataaaaaagataatttagagtatttaccatccaattcgcgtgcctcaactcttttacaacccaatccgtatgccctctataatatatcattaggactactaattagtctatttggtaccactttctcagtttttgatgtatttctcatttcttaaatcaatttgtatttctttccaggcattttggactgttttgcccctaggcccacttgtcagatcaaagggtgagatatcctttggagtctggatcgatcgatctgagcgccatcgacatccactccggcgccgcgagcatgagggccaccaccccgccggcccagtcgatgccccaccgccaccaagcgccgccgcctgccctcgacgccccgcacatcactccgccgccgccgagcgcccccaccgccacagtttgccgccggcccagctcccgctggcaccaagctcatgttttactttttctgcaggagactgcagttactatgtttcttgcatagcattgagacacatagttgcttcgttactctcagtctctgaccagcattgtcgttgtgctccatcccgatcagcatgcagctgatgtcattctagctagaattgatagccaaagttactgatgtagttaactgacaggcaatttatatcaccaagaactgaacatatgatcaactatccatcttcctttcttcagattacataacccaaacaggaacaagtgcaaactgaagatgtctgtatttttttagagaaaaggctcaagagcccggcttatattgaaagccagaaggtatgctggggaaaccagccagcgttttatagcgcaggagggcaacgcctcgaaacaaaagaaccagaactctagaacatcttaaaccaacgacaggttaaagaaaaagaacaaaagctcgcagcctctgaagaactacatcaaggactgaaacagactagccaattcctgctctggtcgcgccaacatttgtaacagcagatttcagtttctcggtcagggcctccatcagggcagcttcattcgcgtgacttaaacccctccactgtaacatgtaagaaacaattcgaaaggggagcattagtggtgagtaaacagtccgcgatctaaaaatcatatcatttctggtagtccagaggacccaggaaatagcagcgagtaaggccagataagtactaaaactcttcagagaagtgtgtttaatcagagaaaagaactcctcaaagctgttaggcacagagtgccacccaaaagcatctctacagacacaccaaatgaaggtggccatggggcagctaaagagaatatgtcttgtggtttctagtgagttacatagcacacaaagttcagaaccttcccaaccttttgttttcaattgttcacacgactggattctatctctaagtgctagccagagaaaatgttttatcttcataggggcagggcatctccagatggcatgcattttctcatctctaattcctctgaacgatagagccctatagagagattgtgtagtgtactgtttgttaggtgtcaacgcccatctcataatatctggggagttagaaagctccaagttatcaaataaatcacataactgcctccattgatcaacctcctgaggaccaaaagatcttctaaaagtaaatatccccaagccctttgtattcacctctgcaattgtaaccttttgctgattacagattttgaaaatctcaaagaaagcaatatttaaagggtaggaaccaacccaaaggtccagccaaaagtaaaaatgagtcccatttcccagttgccacacagaaccaaacttcatccactttctagtgttaagaacacctgtccagaattgagagaccccttcagtagagcattgaaaaactcctccttgtagaaggtatttcttccttaaaagctcaacacaaaggctcttgtcttcagattcaatttttgttaaccatttggcaaggagggcagtgttaaacagtcttgtttcagtgaagcctaaacctccaaaatctttggggagtgctaagtcagcccacttcaccatatgatatttcctcccctgtttattgccagcccaataatatctacctttcaaagagtcaaaattctagtgaacaccctcggggagttggtaaaagcccatggcatatgaaggaatagaggataggcaagagttaatgtgaacaactcttccagcataagataaagggcctgcccaatttcccaacctcttttccattttgtggggtaagaacatcaggtcttgtttaagaatcttatcagggctaattggtaatcccaggtacttcataggaaacttcccaatgggacaattaagcatctttgcaactctgatggtttcattctcctcaagccccacagtaaaaacctcactcttgtggtaattaatcttcatgccggccatctcctcaaaacagtacatgataaattttgtaatggtgatctgggaattatcaaagggtataaaaatcacagtatcatctgcatactgcaaatgagtcagacctcctggacaaagatggggaactaaacctgagaggatccctgattgtttggctctatcaaaagaggctgctagggcatcactaaccagattaaagagaagaggggagagggggtcaccctgtctaagccctctataagtgctaaagaaattgcttctctcaccattgatgttaacacagaccctcccccccccccccccaacacaagctttaatccactcaatccacttagaaggaaaacccttaagtttcaagatttcaaaaacaaaggaccagctcactttgtcatatgcttttcaaagtcaatcttccaaataatacatctctgttttttggatttcaactcatgcaagatctcatgaaggataacacaaccctctaggatgaatctacctaggataaaagctgtctgggtgatagaaatcatgtcattagccacctctgtgagtctgagcgtgaccactttactcagaaacttaaaacagtcattgaggacacagatgggtctgaattgtttgaagatgtctgtattgtgccgctgaaagcctgaaactaaaccaatttccatgcagattcccgttcttccagctgccattctgaacaacatcgcatggaaaattgctaccaatttcagatatgtacactcccataaacaatcaaatatgtctatgtatatagtatacacaatacatgaactagtacatcaaaatatgaacaatcaatgagtagtgccccaattctctgtcctctatattagagtgtatttacacatagtataagcaaatatgtgtttttccaactgaaacactgaaaaagaacaaactacagcttggtggcggcagtggggcgtcgagtgccgacggcgcccagcggcggggttggcggcgcccggcggcggagtggtggcggcgcacggcggcgggggtggtggcggcgaacagcggcgggggtggtggcgctcacggccgtgctgagcgacgcctggagactggagggatcaatcgattgagagaggaggaaacatcttcctttgatctgacagtgggcccaggggcaaaacagtccacaatgcctgaaaagaaatacaaattgagttaagaaatgagaaatacataaaaactgagaaagtggtaccaaatagactaattagcaatcctaatgacatattatagatggcatgtggattgggtggtaaaaaagttgaggcacgcgaattggatggtatataatctaaattctccataaaaaagaatgctgattgtggtatcttgtaagtacttcactatacgatcttcaaagctgggtccaaattcttaatccaagtttcagccaaacttcattgcacatttgcataccagccgactatcattattgaagaaattaaccatatctctaacagataattacataatccagttttaatttagttcatgtcacttgcaagaggaactttacatgataatatagactgttgcctaagatttttcattgataattttttatgtaatctgcggtactctctgcccccccaaatggatctttcattttccacacacgaatgtacaaaccagaggtcccattaaaagcgtgttcaattaatcctcatgaggagggattggagaaaattgagggattaatttcacacctcaatagttatgtaataaataaatcatctccaaatctccctcgatcccttttggggattaaccaaaaaagtgaagtaagccaaaaaaagtaaatctaacaaacagaacatgtaatggtacagttaaaaggtaacgaaaacatcggcaaacgagaaaaaaaacaagtaaaacagatcgagcactacaccttaccaagaagctttaccaccagggacggggagacgtacgtacggcttcacacgaccaattgcgacggcagaactagggtcacccacgtttaatttgttggagtctcctgtccgcttgcgctacgtacggactctccctggctcctcacgtaagcccatctggcccaaccacggccttccaacctgcccctagctggctagctagggctgcgtgccaccgtgacctgacctagacggagacggccgggcccgggcgcgcgaggggacggcgacgaagctctcgttgggcgcacatggagattgaggacggctgcgccaaggttctccacgggaagaaggaagaagcgatcacgatcacgccccaagacgaccggtgcccagatggcgtcggcgggcaaaccggcggcgggggtcggcggctgcagcaaggaagccggagagagacgccgcgccgccaagaataataagcgccgccgcaccgagaaagcggaggacgccgacggcggctgcggcggtgacgaggatcaggtggtcacctccaaggcgatggaggcggtgtcagtgccggaggaggtactccgggccaagaagaagaacggcgaccggcgaggtcgcagcaaggaagccgaagagaggcgccgcgccaagaaagccgccgacaagaaaaggagagcagccgccaagaagctccgcaccgaggaagcagaggccggtcgtgatgacgacggggcaaaggaggcagaggagggtacaagtattcacttaaatagcatcaaattctgctgtctttactgcatacattgttgatttgccctgttctctaatctgtactgattcagttcaggatttctcagttttgtagcattagaaggctcacataataaacagtaccgaactttcagtggttaccgcatatcgcatctctctcgcaccgttgtttgctgcgttttctttaacctgcattaataactgtgctcacttactttttttttctactttcctccaggacgtccacctaattaatgcaggaatgattaaccatgttaattacagacaaacccatagtaatagacttcccctagtctatagtactaccaccacctgacaacacggaattcaaatagatctggacgctgatcaattcagaatacattttgggaccattgatgagtacttgttgaaatgtttatgaagcttagacctagtttagttcctaaaattttttcccaaaaacatcacattgaatctttagagacatgcatggagcattaaatataaattaaaaaaaaactaattgcacagttaggggggaaatcgcgagacgaatttttttttgaccctaattagtccatgattagccataagtactacagtaacccgcatatgctaatgatggaataattaggctcaaaagatccgtctcgcgatttccaggcgagttatgaaattagttttttcattcgtatccgaaaacccctttcgacatccgatgtgacacccaaaaattttctttttgcgaactaaacatgccattacttttcgatggatttggtctcatgtcgaaattcttcctaagctgtttagaattatcaaaacgagtcagttacctcatccactacgagtctcagttttgggtcttgtgtaattatgtcatgagctaaacccaggggaaatgtgccttggggctgttcgtaggacatccactcatatatactccctgcgtcctataatataagtgattttggttggatggaacatattatagtactacgaatctaccctgtcctgattcctagtactagaatatgtcatatccaaccaaaagcctttatattatgggacagagggagtattcgatagtcgttatcgtttaattaagaaccgggtttgtttatattattctgccaattgtagtttcgacgctagttcgatttgtggaacccaacttgtgagattcatcttatattcgcaatatattcagattgcatcttctactcttttgcttatgctttcaatttgcttgcaggagatgggttaattggattcataaaaagaaactaatagatgaaaaggagttggaagctgtcgaaacaagatttcagcaatactaaaaggggtggctatcaagctagaaaagtggatgggtttgaagacaaggaattttatacaggttcaggcttccttattcaagaagtaataccctactcctgtccggggatgattccgccgagtgtattattgatcgtatgatctgggagaaaatcgtgtcccgagagggacccggacccctccttatataggggaaggggtccgtattacaaaatacagtccatatccctaacggaatatgtgattacagataaaatacaatcgtaaccgactaggatcccgggtatttccttgacatacaagtttagaaactaacccgagtcctcataaagatattctatctatattcggtaccctgtacccaactagactataactgccgtgtagatatggggtatccataatctccacagtagcccccgagacctttgcagtcgatgaaatagccttctccgaacaaaaagcaataatccgagtgcttcaattcctcctgctctggtctgccgagtactaaaatcaaagactgtgaagggcgaaataaaacatggtgcatcgagtagatgcacctaattaggtgtagcccccgagtatgtggttagttaaaaaactaaacatgtagtcaagaaccgagtggttttacaaccaaacatcatatagcaaagcatgcgtggtattcaataaaacacccagccgactgcttcttagctttaatatatcgagaatagaaatatgaaaaggcccgagtgacaaacactcaaaagatccacaaatagacatattttacaagaatccgagtaagaaactcttaaaatgatccgccaaatatgataaaaaccatggtaattaaagaatctaatagcctaggctatgactcttaccacaatcaaaataagcatataacatgccaagagaatgactcctaataaactagtcatctcaaatcaacccaaacagcttttgcagcctaataaagcttacaaaaatagtataacacctttttgtcgggcacctttttatttgcatcataataattccaaagaattatctaaccgcgttaaaaaggattttagcagcatcgggtcacatcattgtgagcacaaattgccaaagcaaaaagcgcctaagtccctagggatcacaacgggccacgctggtaataatattgggctgaagtattgtacaggcccaggcccattagcactcccgataccctaacaaaacaccgaagtccaagcgacgcttcgtcttccccgccgagactctcgccatttccccattcctcgctacagtacaaaactgcgccgacgaagctagggttcatcaatccgccccaatccattctcaaaaatcccatgaaacttctccgagcgtccaccgcaccgattccccatccccctccagctatatctcggaccaaatcagaccattcagctcgcattcatggcggaagagagagaaagtttcgagagtcagtgggcgccctccgatgtggcggaggagaatctgaaagaaatggtggcgcacaacgttcttccagcgaaggagatcatcgggtggcgaccagcgttcggcgaagtgttcccgaccccggatacacacgaggtcgtggtattttctcacttcttttatggcggattttctcttccaacttcaagattcttccgaggaattctgaacttctatggaattagcctgcatcatttgaatccaaactccatagtgcatatcgccaattttattcatgcctgcgaagcttttctgggcattaggcctcattttgctttgttccgccgcatttacttcctcaagccccagccgaacaagagcaaaccatgcgttgttgggggcgctggtttccaactcagaggaacactaagccaaaagtatttctccatgcccttcaagacgtcaaacaaaggctagcacgcaaactagttttacgttcaaaatcttgaacccgcactccccgagtactcctgtctccctccggtctattaggacacatggaattcattgcctatgggagatgaagctgctcaggcagtggaattgatggagcgcatgataaagctgaaggaacaaggtttgcaaggagaacagatcactcggcacttcatcaaaagtcggttagctccaatcaaagagagatcccgcacggcttttgagtttgacggcaaacatgatccaaatcgtgaagatctagactctcttgactttaaggtcatgaaggaaagaatgtacaagatcttctcaaatgctatcgtcgtcagctattcacatctgctgccagttgtgccatacaatgcattcaaccctcctccaccggtatggattcaaacacttcaaccttcctcaaaatatgatcttgtcttcttgttgaatcagttgacagtggaagatattatgtctaggaatttgctttgatgaagtcggatcccccaatcgctcagcgccgatcaccccgccgtcaaattggtcaggggagcggggaaccaaagatccggtctgaagcccagtcgaatacctctaatccagtcggccagtcggattcccgcaagaggaagttagtgctgagtgacgacgaaggcgatgacgctaaaaagcctggagatagagaaacaaccagaaaactgccgaagcaagctattccaaagaagaaaacatccagtcgtcctatgccgaagatcaggaagtcttccaggtacaaatcatataacgatcttccttgtttcgatgctcacttatcatggaaacaacgctgacagtacaactcaaacttgtagaaaaccatctgacatagacccttctgggaaagactctgatccgactaacttggacacgagttcttccaaagaaaccgggccgactgctgaggatcatccgagtgacaatcagccggcaaccgataatgtaggatccggtgatcaacccctgactggaaaccagtcggtcgaagctgaagccggagttaatcaggagcccctgactagaaaccagtcggacacagggccaagccaagagattccagaagtcgaagcccaagcagacaaccctcgtggtcaagacgccagcaatgaccggagatctggatctccttcaaaggcatccgagtccactcgtcctcgtccagaaatcatcacaggtaaacactttgtctgaaatcactttgatctaactgactctatgtgattgttcgacctttttccatggatgcattaggaccaatgattggtgatgaagaggaaattctccggatacgggtggctgaagattcgcgccctcccattctggtcaagtggtgggatgacgatttgcaacctcaaggaattgtgataaactggcaaaaagaggacgaagaggtgtgcctactgaaaaaggcactcggccaggcgactcgcattgtaaacgtaagttccttgacgcctgacctcaaccatcttgttcgctatctagctcaaacgctaataaaactgttttgtagaggattcatcttaggaatgaagcgaaaaccgcgaccctagaaaaattagtccctcatcttggaacccttgaagctgtcagagatcagctacacgaggcaaaagagcttgccaagaaaaccgagcacgatctgtcgcgaccgagaaaaatacattttcccgaacgctagtgtattaatccccgtcccaggaaaagccggggtacaccacacaaacatgatacaaaagacacatctttattatatcgataatatttacattattacaaaggcatttaaggcctgacaatcaaaaataaacagcagcggactagcgggcctatggctccatcttcacaggcgctcaactggggtataagccaggactccacctaagacttcttctccaaagcttctcttactgaaggggggaaagattgagcaagaatgagtacaaccacagtactcagcaagccacaccggcagatgcatgattaatgcaagggggtacaaggggtaataatataggggttaagtttggtagaaaacagcatttaaaagtcacttagttgcccaaagccattttataaagacgatactagagttacacagtattattaatcaaggccatggacccacacgaatgtcgcgaccgagaaaattttgcattttcccgaacgctagtgtattaatccccgtcccaggaaaagccggggtacaccacacaaacatgatacaaaaggcacatctttattatatcgataatatttacattattacaaaggcacttaaggcctgacaatcaaaaataaacagcagcggactagcgggcctacggctccatcttcacaggcgctcaactggggtataagccaggactccacctaagacttcttctccaaagcttctcttactgaagggggggaaaagattgagcaagagtgagtacaaccacagtactcagcaagccacaccggcggatgcatgattaatgcaagggggtacaaggggtaatgatataggggttaagttttgcagaaaacagcatttaaaagtcacttagttgcccaaagccattttataaagatgatcctagagctacacagtattattaatcaaggtcgtgaacccacacgagcctgccttagcccaaggcctacgatgattcagaccgaactggcaacccgaccctgggtcccagctcgtcccaagccaacccaggccaaccattctacaatttagttgttaagcaaattttaagaattaaaacactaacttgggtacattgctcggcttgcccataaccgagggcgcggctattcgaatagattatactctgatcagaggtgtacatctttacccacaagacacatcttcctcacgtgtaaccacgtgccacataccaccacggtatacggacggaagacgtgacatagttcccaacccatcctagccataaacaagagtaccgacccaaccccacctacggccggcacccccgggacaggtaggcaggactgagccaccagcagcaggacaccaaccctgtgccatgacatctcgactaccgggccgcagctcgtgtagccttcatttgtcctagagatgtccatcgacccccgacttcgtccatctccatccgtgtgcttttgtttataaccagactgagccacaaactaagccttacccactagacatgtggaagtacggtagtgctttgcaacagaggcccgagcttagtccttatagtggccggggtgctacttcccacaactggcatgcacccaaaccccaccgaaaaaacaggttttaggggctttgaaagaggaagagaggggtatgtccaattccaccataagccaaccattccatagtatccaagagatatgaatattcccaaagtctaaagttataaaaaccacctaatgttgtcctattaaccagcgaagcatctacctaaagtcatactagtggtaccatgagtagagtgtccactagttggggttttgtttaatctagggtgaacaaggtaataataacaataacaataataataaggtcataacaaaggtaaataggcatggctagataaaacagtgataacgcgggaatttaaataaagcgataatgcaataatttaaagcaacataattttataagctgggattcaatatgttcaaggatgatgtgacttgccttgctcgcttttccaaacgtcggcttcaacttccacgaagagcggatcttccgaagctgcagcgtctacacgaccaacggaaaagaaaaggcttttactctaataaactccatataacaagcaggaacaaagcacaaaaatgggttcttgacttcttaaggaaaaattagagacttgaacggtccaattccgagttcaaatggccaagttatggccatttgaagtttatatgctctttaaatgaatatttgcgaatttcttcatttaaattttaatttaaaaaaaatggatttattgcgtcagccgaggggaggggcgcgtggaccgggtccacgggggtggggcccacgcggcagccccacggtccacggtggaccgggcgcacccgggctcacaccggccggcgccgggggtcccacgcgtcagccgcacctaaaggcgcgggcggctgacagccgggccccacgcggcagccgctcggtgcgcccgaaggcgaccacgccggcgcagcggcgggaggcggcgcgcccgcgcccctatggtcgccggcggcggccataggcacggcggagcggcggccgagagaggggagggaaggggggaaacgaagcggcggtccacggctcaccccgggtcgacggcgacgacggaaacggcgaccggagcggaggaaggcggcggcgcggctcgggtggacggggtcggcggtgctccggcggtcggcgagcgaaatagaggggtggacgaggtcggcgaggatgcggcgaagccgaaggaggcggcgccgagggggaaggtggtccggggcgacgacggcggcggaccggagctcggcggcgacggcggagagagagagcgacggcgcgagctcgattccgatggggagtgagggcggcgagtggcggaaacggtggagggaggcacggggagggtttatatagggttgggagtgagagggggtggccggaggaggggaaaacgggcgcgggagtcccggccgccattaatggcgccggcaaggttaggggaggagtttccaaacgaatccgagggagagagagagggaaaaatggggggaaagggggaggggatcccggggaataattcccccctattgattgcacgcggggcggacgggggcggcgggattcgcggcggcggcggcgctagggcgcgggcgaggcggcgggagcggcggaaggaaggggatgacgggtgggccccacccatcagcgagggaggcgggcgggcgggcccgtcagcggtgcgcgcgcggggaggaggccgaatgggccgcggggagaggagagggagggggaaggagatgggccgaggcggcccaagagggagaggggggaaaagggactttttagagcttttctttttataaaaccattttaactttgtttatttcctcttaattattatttgtgctctgaaaatttaagtaaaatttgagggctccttttagaccaaggagaatttaacaaaaattctccggaccacattcgaattcttctggcacgtattttagtgtttgccaatttcttttcgaattttaattaattctattattccttttagataatgatttttatttcgggatgaatttatcaggacgtgacaaatccaccccccttacaggaatctcgtccccgagattcgaggaggctagcaagaagataggttgggtggtcttctcttcttgtctgacttcttccgttgcatcttcttgaacgggcttgcccagcaaaacttccccactctgaactgcttggcttgatctcctcttgcagatggaatcttcttttcacctgacttgaaccagggtgcaccttttagctgactcagactaggttgcggtagtttaatgatgcttccatttccagaacttctcataattcatatctttggcgtcaacctcatacaggttacccacttcacgttatgcgtcgatatcagcttgtcattactaggataccatgcttgtcatcatgagaataccatacttgtcatttacttctaacttgccaccaactgcctcatattaactttcctgctctccgggtgctagctacttctgctattcgatgcaagggtcgataactttgcctttgaattatgtttctcaaccgaaccaacttctcccacttgacatgctttgacgtcttcccaaatggctttactgctggacttcttattgtttgatcgttatcctgccaaatctgaagcttcgttgtctgacctctgtagactatcttcgaacatatcacttggttcataactgggaatagctcccacgaacaagcagctcggattcactttctttacattcagtttatttcccactattctcttcatgttgtcattatttagcattcaacgtattcctttacaccttcgaccttgatgagttccttcccattggatcatctcccaagacatggcattgcctggtaaccggtgcctgcacttttcactccgtgtagcatctgataccgagttgaagatttcactccttgccttcatagaaacacttttacctaggtcatcttgcttactcacaatttttttttctctcaatgacaaggtgactgttgcagggcgattactgtgaggagtcttccttgtgtgatgcagagcatgtttctgattatcctttatcaatcaccgttcggcctacatctttccttctagagaacatcttggccaacctcttttatcaatcatctttcggcctatctctaacaggtggtactctttaatgtgggttgcagacacttctggtggcgatgaggtcctttggtctgctgcctttcagtgaaaccttgaagtgtttcgccaaaagctatactgactgtcattgcctttgacccgaaaaagacacatttgaaactcttagttcaaacaaatgtctctttggttaatcgcttgattttcttttccatcatcaggttggttattaactcaaggttaaaatatagttcctctgaaatgagaccctatgtctcctttgtcagtaaacaattatacacataatcccatatccacatcttccaaaagaatcctaatagaacttgtctgtattacatatttctcccttattacatgaatacaaggcactaccttaaacaaaaagggaagatgcttaacatcggtacattgtttctactatgggttatgattaacacgaggcctcacaggtatggcgtttgctccagtgaccacaaggcgagtgacttgtcttcttcttgcataatggccggagtgatgacgcaggttacgcttcggctgtggacaatctctggagaaatgacctggttctttgcagttgtaacaaatcaatgtcttctttactgagttgtccgtctgggaacgatcattctgacttggagttggaattggtggttggaaatccttgctaacattggcatcagtggtaccatatttgctatcaccattggagtctttctcagagtcaaaattgctagggttgtcattctgggtgccttcattgatactatcgtcgatatcttggtgaatgctgttgacattgcacgcttgatctaagtggtcatgaatggggcaagaaccatggttgttggtggtatcatcagcattagtattgctaatgttgttgtctgcgttgtgtccatcttcttggggtagtaactcttgatgcgcaacagaagatccggtgatctgaagtggctcagtgcgctgtctttggttaccacatggaaatactgggatgttgacaatccttctcttgtagttcgtcatccgattatgctcactttcgagttgcatggctttgtccacaagtttctcaaaatcttcataatcctctaggagtagttgcactgcaagctcatcttttaacccttggagaaacttctcttgtttgtcttcatccgtttccacatcttctggtgcatagtgagccaaacgatagaactcgtgcaggtactctgtgacggtcaaatctccttgcttccggtagcgaaactctcgttttcttagtgtgatcattcctgcgggaacatgtgatctcttgaatacagatgaaaactcgttccaggtgatggtatgtccttctggccgtgatgcttcgtagctatcccaccactctgaagccggtccaaccaactgatgtgttgcgaagccaacccgctcctggtcggtgcactgaatcaaccctagcttcttctcgactgtgcgcaaccaatcactggcttccataggatcgacggcaatggcaaaggttggaggctcagttttgagaaattctgataacttgcactgttgctggactgtaggtacttgaacgttggttgcccctgctgggttgttccaattctgtaatagttgaaaggctgttgccaacatgttggtttggttaaccacaatttggattagctctggtgaggttttgttgatgcttttctcattcccattggcttgggttcttgagtcatcggatccatcattcccatagcctttgttaccagtgttatccatctgtcacaaggtagaggttgagaggggaagcagacaaggaaagaatggaccagaactagggacaagaccttaaaggaactaactctttttgttgatgtgttgtttgttttgcttattctgcaggttgattaagcaaacaacctagcatggtcacatcacaacccaccgatgcaaaccacgcactacacacacaagcaaggaaacacacgactaacaacactatcctagaggacggcttaggttctgcgactggttctccaagatcttcactcctgcttcacagctggcttcattgcttccttcgcttcgctagcggaccctacggtcttccggaccttcggcgaacaattgacgacatcttcttcttcgcaaaactaaccatctagtactagctgaaatttgaagaaggaagaaagagtaaacattttgcaaatagcacaggggaaaggaggaaaaagggactttcgcaaatagtttcatttataaaatatgtccttaggttttatccacttggcttatcctacagtcgagatggctctgataccatcttgtcgcgaccgagaaaattttgcattttcccgaacgctagtgtattaatccccgtcccaggaaaagccggggtacaccacacaaacatgataaaaaaggcacatctttattatatcgataatatttacattattacaaaggcacttaaggcctgaaaatcaaaaataaacagcagcggactagcgggcctacggctccatcttcacaggcgctcaactggggtataagccaggactccacctaagacttcttctccaaagcatctcttactgaagggggggaaaagattgagcaagagtgagtacaaccacagtactcagcaagccacaccggcggatgcatgattaatgcaagggggtacaaggggtaatgatataggggttaagttttgcagaaaacagcatttaaaagtcacttagttgcccaaagccattttataaagacgatcctagagctacacagtattattaatcaaggtcgtgaacccacacgagcctgtcttagcccaaggcctacaacgattcagaccgaactggcaacccgaccctgggtcccagctcgtcccaagccaacccaggccaaccattctacattttagttgttaagcaaattttaagaattaaaacactgacttgggttcattgctcggcttgcccataaccgagggcgcggctattcgaatagattatactctgatcagaggtgtacatctgtacccacaagacacatcttcctcacgtgtaaccacgtgccacataccaccacggtatacggacggaagacatgacatagttcccaacccatcctagccataaacaagagtaccgacccaaccccacctacggccggaacccccgggacaggtaggcaggactgagcccccagcagcaggacaccggcccgatgccatgacatctcgactaccgggccgcagctcgtgtagccttcatttgtcctagagatgtccatcgacccccgacttcgtccatctccatacgtgtacttttgtttataaccagactgagccacaaactaagccttacccactagacatgtggaagtacggtagtgctttgcaacagaggcccgagcttagtccttatagtggccggggtgctacttcccacaactggcatgcacccaaaccccaccgaaaaaacaggttttaggggctttgaaagaggaagagaggggtatgtccaattccaccataagccaaccattccatagtatccaagagatatgaatatcccaaactctaaagttataaaaaccacctaatgttgtcctattaaccagcgaagcatctagctaaagtcatactagtggtaccatgagtagagtgtccactagttggggttttgtttaatctagggtgaacaaggtaataataacaataacaataataataaggtcataacaaaggtaaataggcatggctagataaaacagtgataacgcgggaatttaaataaagcgataatgcaataatttaaagcaacataattttataagctgggattcaatatgttcaaggatgatgtgacttgccttgctcgcttttccaaacgtcggcttcaacttccacgaagagcggatcttccgaagctgcagcgtctacacgaccaacggaaaagaaaaggcttttactctaataaactccatataacaagcaggaacaaagcacaaaaatgggttcttgacttcttaaggaaaaattagagacttgaacggtccaattccgagttcaaatggccaagttatggccatttgaagtttatatgctctttaaatgaatatttgcgaatttcttcatttaaattttaatttaaaaaaaatggatttattgcgtcagccgaggggaggggcgcgcggaccgggtccacgggggtggggcccacgcggcagccccacggtccacggtggaccgggcgcacccgggctcacaccggccggcgccgggggtcccacgcgttagccgcacctaagggtgcgggcggctgacagccgggccccacgcggcagccgctcggtgcgcccgaaggcgaccacgccggcgcagcggcgggaggcggcgcgcccgcgcccctatggtcgccggcggaagccataggcacggcggagcggcggccgagagaggggagggaaggggggaaacgaagcggcggtccacggctcaccccgggtcgacggcgacgacggaaacggcgaccggagcggaggaaggcggcggcgcggctcgggtggacggggtcggcggtgctctggcggtcggcgagcgaaacggaggggtggacgaggtcggcgaggatgcggcgaagccgaaggaggcggccccgagggggaaggtggtccggggagacgacggcggcggaccggagctcggcggcgacggcggagagagagagcgacggcgcgagctcgattccgacggggagtgagggcggtgagtggcggaaacggtggagggaggcacgaggagggtttatatagggttgggagtgagagggggtggccggaggagggggaaacgggcgcgggagtcccggccgccattaatggcgccggcgaggttaggggaggagtttccaaacgaatccgagggagagagagagggaaaaatggggggaaagggggaggggatcccggggaataattcccccctattgattgcacgcggggcggacgggggcggcgggattcgcggcggcggcggcgctagggcgcgggcgaggcggcgggagcagcgggaggaaggggatgacgggtgggccccacccgtcagcgagggaggcgggcgggcccgcccgtcagcggcgcgcgcgcggggaggaggccgaatgggccgcgaggagaggagagggagggggaaggagatgggccgaggcggcccaagagggagaggggggaaaagggactttttagagcttttctttttataaaatcattttaactttgtttatttcttcttaattattatttgtgctctgaaaattcaagtaaaatttgagggctccttttagaccaaggagaatttaacaaaaattctccggaccacattcgaattcttctggcacgtattttagtgtttgccaatttcttttcgaattttaattaattctattattccttttagagaatgatttttatttcgggatgaatttatcacgacgtgacaacgaacctgccttaacccaaggcctacgatgattcagaccgaagtggcaacccgaccctaggtcccagcttgtcccaagccaacccaggccacccattccacattttagttgttaagcaggttttaaaaattaaaacactaacttggatacattgccaggcttgcccataaccaagggcgcggctattcgaatagattatactctgatcagaggtgtacatctttacccacaagacacatcttcctcacatgtaaccacgtgccacatagcaccacggtatacggacggaagacgtgacatagttcccaacccatcctagccataaacaagagtaccgaaccaaccccacctacggctggaacctctgggacaggcaggcaggattgagcccctagcagcaggacaccagccctgtgccatgacatctcgactaccgggccgcagctcgtgtagccttcatttgtcctcgagatgtccatcgacccccgacttcgtccatctccatccgtgtacttttgtttataaccagactaagccacaaactaagtcttacccactagacatgtggatgtacggtagtgctttgcaacagaggcccgagcttaatccttatagtacccgaggtacgactaacaaaacccaaccacgcacctcgagcccagcctaaaaccattttgggggttttgaatagagggggaggtgtgtgtccaattccaacataagccaaccattccatagtatccaagtgatatgagaattcccaaagtctaaagttataaaaccacctaatattgcctaattaatcagcgaagcatctacctaaattcatcctagtggaaccatgaatagagtacccactagttggggttttattttcctagggtgaacaaggtaataataacaatagcaacaataataaggtcataacaaaggtaaataggcatggctaaataaaacagtgataacgcgggaatttaaataaagcgataatgcattaatttaaatcaaaataattttataaactgggattcaatatgctcaaggatgatgtgacttgccttgctcagagagaacggccttccgaaccttcggcgacgaccgcgaaccacgcttcgggaacctccagaacgacagaagctacgcgaagcacacaagcaaagctacaagcctataaagaagcaataacaatacataaaaagaaagcacacggttctttaggttataacaaaaattaggagacttgaacatatcgattcggagctcgtatgaccaagacatggtcatccgaagtttaatgctgttatatggagatttgcggattattgtaattaggttttacaactataaaacatgtgtaagtgctagcctggaaaagacaggaaggctgcgctgttgacatgcggactccacatgtcaacctaagggaccgcggtagaccgagtacacagagacggtcgacgggtcgacggaagcagaccccgtgtgtcaaccgaggcgagtggccgacaaatggactccacaagacaccacgtgggctgtacacgtggaaaccacgcggctaccgagcgggcacactaacacggtcaccacacgcataagcaaacgactaccgacaccggtacacgggtaccggggtcgacaaccgcacaacgggcacgggcgacaccgaaaggacgaggacggggcagcgaaggagagatccttaccaccacgcgacgaggcgagggaacgacaacgacgaacgggcgcggcggagacggccgggaatgacggagacaaaaggcgaggggacgacttcggcagcgatccttggacgaaggcgagacgcagccagcacaacgcttggcgacacggaggcgaggacgaagacaatgacggggctgcggcacttgacggaacgaggacgacgaacgagaacggcttgacagagggacgaacaccacgatgaccgggaacgacgggaggacgacgacgaccggggccggcgaggaggcgacgtgggcagccggcggtagctgcacggagacgaggacggcgtggaacacgccgctgcgaatccgatgacagaggcggcgcaatgagacaacgagccggcgaggaggaacgatgacgacgacgacgaacaccggcggggttcggtcgaaggggaggcgaggccgagggcgaccttgccgctgcgatgccagaggtggagatggcgacgtcggccgacgcacgggcacggcggaagaggctgccgaaggcgacgtcgacgaggaggaaggagaggccggcgtgggcgacggcgttccggcgaaattcgggcgacgccgtggcctggccggggaagaggatggcgccgcggtgccggggaaggaggtgacgacgacagccaccgtacctgcgaggtggcacaggcggctggaggcggtggagtggtggcgacaccactagacgtcgacgaggacaccgttccagcgagcttcggtagaggggacggtgaggccggtgaaggggacggcgttgcagagccgagggaggtgacggcacggccggacggcgcgcaggcgaggcggtaggggtggctggaggcggccggcggcgtgggagagagaaggaggacggtggagagaggcggggcggccacgggagagcgcgggagggggctaaaactggagaacgtaccgagggggttccattttataggggaggagagggagccgggcatgggagagggcggaacggcgacgggaaacacggccggcagccatggaaggcggccgggaatggcgcggccgttccgggcgattgggggcgccattcaagggggaaaacgggagaaatcaaagaggaatcaatggggattaattccccctatttaattttggaatcccatgattaaatcgcacggatttgagggaggaaaggagctagggttcacgggagagagaggaggccatgcgggaggaggaagacgaccggcgcgtgggccccacgcggtcagcgcgcgtgcaacgcgcgcgcggcgcgcgtgagggggggcggctcgggaggctggcgcggctgggtggcgcggcttgggccgggcggccgacctaggaggagaggagggggaggtggcctcggggagagagggaggaggagggagtgggccgaggggaaggagaggaggcccaagagaaggagggagaggaggaaagggagaggaagagagggaggaagagaggactttggccgcgggccgagagagagagaggactttgggccagacttggcccaaagggaggagggggattatttttagctctttctttttaataaactttgttaattgtttttgttgcttaataattattttcggtgctctgaaaattcaagtaaaatttgagggctccttttagaccaaggagaatttaacaaaaattctctgggccacattcgaatttttcttgtatgtattttagtgtttgccaatttcttttcgaattttaattaattctattattccttttagggaatgatttttatttaggaatgaatttatcaggacgtgacacgatctaagggatcggatcgccctgctccaggagtctaacttcgaactgagtggctcatcaaaaggtacacacaaaatctgtccgactaacttgtgctgtcatctttgtaacttcaattaaccggagtcaatgtagtgcaagccgccaagatatctcaattggagaagcagattcagactctggaaagcgataaagcagagctggcaaggcagagggactcggctttgaaggacgttgaaggtaccatcaatcttctatatactgactcattaatatgaatctgttgatgcagactgcaagatcaagtcgcaggctcaattcgacgtcctggttggcaaaatcaaaaggcttgaaggggccagggatgaagttgctaacgctgctaccccactcgtccaagctatgttcttcaataacaacggtccgagtacattcgatgcttccgaaatctttgacaagctgagagttgctccggatacatatttcaagaacatcaaagaggccgggagtatgggagcgagtctggcgctagcaatgaccaagtccctttactcgaaaatcgacattgatgccattgacggctttgcagacgggacgagcgaagaagctgctcttgaccttatcaatgatgcgcagaaagccgccgacaagatagcggtcgatgtagtcgagaggttccaggacaccgatcttcgaccgactggtcctgataactctgatgatgaaaaaactgatactgattgatgtaatgtgataaaaatgattctaatgaaaatgatggaggcacaatttgtataatactgatgaatttatgctgtgctcagtgtttcatacttagcttctgatttcttaaaagcttttgtcaagccttattgagcctaaaacccgcaaaagctattaaaaactttcagtcctcatggactaagccaaaaaattaagcaaggcaatgataaatcgagtaagcaaattgaactaataaaaatcacactccattattattatgatagcccccgactgatgacttcaaggaaaagcttgatgttgtcagtcaaaatagggaaatacagaaacaaaactttaggcataaaaacgacgaagatgttcgatattccaagaattgtcgataggtgtaccgtcttcacgcttgagtcgataagaacctggccgagtaacttctgagattataaatggcccttcccataaaggagataacttgtgccgatcccgtatagtttgaatttttctcagaaccaggtcgccgactaagaaggctcgcgatcggacgttacgattatgataacgacgcaacccttgcaagtatcgggccgactgaattaaggctgcttcgcgggcctcttctagtcggtgtaggtcatccactcggtcttctccgtagcgctcttcatgaaaattgcgaaaatgcaaagattcaaattctacttcactaggcaacattgcttctgctccgtaaactaagaagaatggcgactggcccgtagcccgactgggggtggtgcgcaaggaccaaagtacagatagcagctgttccacccatttgtcggtataaggattcagtcggtcaaaaactcgtgcctttattccttggagtaccatcccgttggctcgttcaacttgtccattgctcataggatgcgctacggaggcataacaaattttgatgccgaagtcttcacaaaaatctttgaatactccgccggtgaattgagtaccattatcagtgatgatccaattaggtaccccgaaccgatgcacaatgttgatgaaaaaatctctagctttatctgccgtgattatgatgaccggtttggcttcaatccacttggagaatttgtcgatagccacaaagagatgtgtgtaaccgctgactgcctttttaaacgggccaaccatgtcaagcccccaaaccgcaaacggccaggacagcgggatggtttgcaactcttgggctggcagatgagtttgtctggcgaaaaattgacaaccttcgcatgtccgcacaattttgtcggcatcggacacagcagtaggccagaaaaaccttgccggtaagccttgccgacaatggtgcgtgcagcagcgtgattgccatagataccggaatgtatatccttcagcaattgtctcccttcttctgaagacacgcagcgttgcataattcctgatggacttttcttgtacagctcggcctcatgaataatataaagcctgctgcgcctggaaatctgctcggcttcgtctttatcttgagggagttcttgggaggtcagaaatcgtatgaggggctctctccagtcggcttcaaccatagctatgtcttgagtgtccgcggcctcagctgtttctctccttggtacggttggctcataaagatgttcgacgaacacgtcagaaggggctgcttcgcgtttggatccgaaatttgctaatctgtcggctgctttgttattgtgccgaagaacatgggtgagttcgagtccatcgaacttatcctccaacttgcgtacctcttgtcgataagcgatcatattgtcatcaagacaggaccactctttcataacttgattaacaactaactgtgaatctccgcaaactatcagacgcttgattcccaaagagattgcgatccgtagtccgtgaaggagcgcctcgtattctgccacgttgtgagatgcagagaaatgtatccatagcatgtagctcagtctttctccagttggggaaattaaaacaaccccggccctgtcaaagtgcatagtccaatactccactccatcttttcctcgggcgtgtcctcttggcactcggtccactcggcgacgaagtcggctaaagcttgggacttgatcgaagtttgcggcttgaacgatatatccaaggacgtcagttctaaggcccattttgcgattcgcccgtttgcttcgcgattatggagtatattgctgagtggaaacgacgtaaccaccgtgaccgagtggccttggaagtagtgaaataatttcctgacagtaattagaacaccatataacagcttctgaacttgtggatatctcgtcttggagtcggccaaaacctcgctaacaaagtagattggtcgctggactttctgaacatggccttcttcttcacgctcgacaaccagaaccgtgctcacaacctgagaagtggccgacacgtacagtaatagcggctcttgtgggtgtggtgaggccagaactggtagagtagtgagaagtttcttgaagtcttcaaaggctttctgtgcttcgggtccccactggaaattgtctgttttctttaacagcttgaagaagggcatcccccgcttgccgagtcgtgagacaaaccggctgagcgccgccatgcatccagtcagtttttgaacgtctttctgggaactcggcggtttcatgttgaggatggcgttaactttctccgggttggcctgtatgcctctatgagacaccataaatccaagcagcttccctgacggtactccgaaggtgcacttttcaggatttagtttcatcctgaaagcgcggatgctcgcaaaggtttcttctaggtccgtgattaaatcatccttctgcttggtcttgacgactacatcatccacataggcttcaacgttgcgaccgatttgagttgagaaacatctctgaatcatacgttgataagttgctcctgcgttctttaatccgaaaggcatggtgatgtagcagtaggccctgaagggcatgatgaacgaagtcttcaagcagtcggattccttcaatcggatctgatgataccccgagtagcaatccaaaaaactgagcagctcgcagccggcggtcgagtcgactacctggtcaatgcaaggcaactcgaaaggatctttggggcaagacttgttgaagtcggtgtaatcgacacacatgcgccattgcccggtcttcttccgaactaggactgggttagccagccagtcgggataaaggacttctttgatgaagcccgctgctaatagcttggtcaattcctccttgatcgcgtccttcctgtcttgtgcagagcggcggagtcgttgtttgatgggtttagcgtcttccttaacatgcaaagagtgctcaatcacctctctaggaataccaggcatatcggatggtttccacgcaaagatatctttattattttgaagaaaggtgatgagcgcgctttcctatttacaatctaacttggcgcctattacagcagttttagtaggatcagaaggatctagggggattttcttggtcttggcttcgctttctccactctttgagatcttggtagtaggcacctctccttcacttgccgtggctgcaaccagtcggatgtcttctcgagcgatcgcgatctcgcaggtttgggccatctcgcaactttccttgtcacatgtgacggcttgcttgatgtcgctccgtagggatatgactcctcgaggaccatgcatcttcatcgtcatgtaggtgtagtgcgggatggccataaacttggctaacgtcgggcgtccgagtatggcgtgatacgctgtatcgaaatcagcgacttcgaagcagacgttctctgtgcggaagttttcccgagtaccaaaggtgactggaagagtgatctggccgagtggcgtagcggataaccctgggatgactccatggaagggcgcgttactcggcttcaactcggtgcgagggatctgcatgtcgtccagggtcttggcgaagaggatattgagtgcactgccaccatcgatgagggatctgcaaagcttgacgtttcgaaccactgggtctagtacctggaggtaccgccccgggtggaccactcggtctggatgatccgagtggtcgaacttgattgttgtctccgaccaccgaagatactggggcgtatcgggctggacagcgttgatctcccgttcagtcagcttttgttttcttttagactcgtaagccagagggtcgccaaagatgtggttgagctccttgcggtgatcttgaaaatctgtcggggcatcatcatcatcatccttctttttcgacgtgctttgttctccgtcaggggtcttccgtgcattcttggcatattgctctgcaaactgcttgtagacgaagcaatctttagctgcgtggttggagttgggatgatgcggacattgagagttcatgatcttgtcaaaagtgttgacgcgcgattgttgtcgggaggagtgtgtagtagtcgcaacaagttcctcgggcttacgcttgcggtccttgtgattgttacttccaccccctcccgtagtcggcgcatctttctttggcttccaagtaggacccaactgtttggatgcgataatggtgtcttcggctttggcatactcattggctttttcaaacatctgtttgactgtcttgggaggtttgcgcccgaacttgccgactagttcttcgtggcgaattcctttggtgaaagcggcgatgatgacgtcgtcggtaatttcggagatcttgttgcgctgttcagaaaagcgttggatgtaatctcgaagggattctccagacttctgaatgatgttgtagagatcaaatgtgtgccggggtgttcaaaggtgccctggaagttggcgatgaactggtcgcgaagttccgcccatgatctaatcgtgccacggggtaatccatggagccaggaccgggcagaatccgctagggccacaggtaagtagtttgccatggccttgctatctcctcctactgcgcggattgcgagaccgtagacggtaagccaagactccgaattgatggtgccgtcatacttctcgattccagtcggcttgaagccggctggccaatccactcgacgccggaataccgaacggggctgagacctggttctttcctgactggttcgaatccgagtcgaggagagagatcttgccgaagttgttagtgatgaagtcgaggctgccgaaccgaaacgcctgcccgggagggaagacgaagtcgtcgatgccggagacggaacccatcacactggtcggcgaaaaacttgacgcaacccctacctggcgcgccaactgtcgaaacagggaggacacatgggctgattgtagccgagaagatttccctggatgattggtatacttcatggttgatatcttcgaatctgaagtccactaggtgctcaagttgtgtagagtcttcataaaggaaccagattctagaatctttctaaaagccttcatcgaagctacaaaaccaatccttgagcagttcagccgatagttttgctccggcatcagttggtgtagaagcgtattctccatatgatgtgcatcttcaatgagtacgctcttctccatcatcatctacaatcgtctctagtcttgggaattcagtttctgatacggatggccgattgacaaccttcatgactatcaggtttaactaggtttgcagtagccaccagggtccacctgctccaactactgagccgactgctatcttagccgatgcattgctcagcatctggtatagatagccgaggagaattttgcccaaggggaattgtctctttgtttctagagcttcagccagaaattgccagttggttgtggggccacaacttgatccacaaaaaagaaatttttctagccacattaataggaaagccacatgttctcgaggggtgaccgagccctggcccatgtatgttgccacatagcctgaccaaccccctatacttttggttttaaagtcatattggttctttgtgttcaaactcatagggtgggccgatgaggtaacatccagacctgtgatcataatgatatctatgagagttggagtcatcggcgcttgattgaacagaaaggcattggtagtgtttgaccagaagtaagaagcagctgccatcaggggttcatctttggccgagttcgctatagtaaggtcaagtgcttggccgattccaatttcatcccagtgaaccctcttgctggctgatacacgtttgaaccatgtggtccagctcttttctagtggaactttctctagggatggccaggatttgaaggtattcttccagtgacctagatctgggttggttaatctgaaggggatcctattagtttcaccaataataaactcggtggggtctggattgccgattgggccaagaaagtagtgattttcatgcgccaggctgggaatcgcaactaggttggaaaggtgctgcaaatccaaagcaattcagagggagagagtgatatcagattggagaagatcgatttgctgctaaagaaggggatttagctgatgagaaattacctcagcatattcggccgatggtgcaccaagtgggctggcgaaagacgacattggtgtgggcggagatctcgccgggaaggaagtcgcctaggaattgcctttgcgccgggggaatcgtcgagaagagagagaaaaggtttcacttgagcggtgaaaacggaagtcacggcgtgagatttctcgggggtaacaggtagtgtttaaagcgctggaataacagttaaaagtggtggagtgcgagaattgctcggagtcggcttatggcaaatccggaacattatcaaatatcccgaacttggggggcatgtgttaacaaccaaatttggtagcatcaacgtcggagagaagattagatcgaagcaaagtcggaagcggagatcgagtttgaaaacaggcaggaatcggctgaagtccagatcggctacgacaagatcagctgagtctgagtcgagctaaataagccgatatagccgattccgacaataagacttgtgcgcgacattgggttcaagttaatgtacttcaagatgattgccacgcatggatagagtcctaggaaggcaattgtatctattaattaggatattttatgtgaattccttatagataagtgtgggcaaaagtctgccgcaaagacttgtggtatcttagagtttgttagagataatggtcgtgtccggtatgggcatatcttgtaatcctcgggtataaatagatcccgaaccctacgtaatttttgacacacacgttcaacacaatcttggcgcttcaccaccctttttactttcgttttatttcgacgagttcttgctttcgggttgagctgcatcggtttcgatcttcaacaagaggtaaacttgttatggcggcttgcgttctcgagattagtgcttccatctttatgacactctaatcttgtttatgtaattcgtcgagttattatatgtcttacataatctctagcaatatcatcatctaacctgccgtcggttaatatctgtcaatagagggtagccgattaggttaaatattgatattggtctagattatatgagacatctaccgttctatgagacttctagcggcttgattgtctagatattgtttttcttttcatacttaatgctgcatcagttaagtctgatctattaagtcgtgcttagaatatcaatccctagcctaccttctagttgccgattagaatagtatcggaatttcagccgatcgtatctgatttaactactctttatcctatatgcttgattgacatgttaaatctgccctttgcgttaagatcttgctgcatttaagtatattaggcttttgtttagtatattctacttgctttaacatcttaacatagagtggtatcggagtattagccgatacatgctagatctatctgatcggctatgctatgaacgcatatagtctaattattaatatatatttcgatctaagtgatttatactgtctcggcatggcgaccgatctatcccaatcacttgatttaagtatatatcgatataaggattatatattgttaatatctacagccgatcgagtagatttagttcttctttacctattcatgactgccgatcgacacatggatgacatcggcccaaagataaatgatatgtcatcggcatctagccgatcggctatcatttatagatttaactacggtttctttacttctatttcttgttgattacaggatcaaatcaactggcacgctaatacatccgaaggcgagctttggacctgcaatggagttaagcatatctcccaggccacgtgctttctgtcaacatgcttttggcacgcccagtgggaccgattagaagtcagacgttagtccctcctcatggccgagaaacagccaccgccaccatcaagcccaggttccgttaaaggcaaggcgccgaagccgggattgaccgaaatcattgatgacaacgtcatgccaatcgatccagagaaattcacgcctgagcagaagcaggagtttgaagcaatgatgcagcaagcacgggaccagttcctgaattcattcatgcagactcgcaagcgaacgtttgttcagaagtataagataaaagtggttgctaatagtcctgaaaccggttcttctaaagatggagaggtaaaacaagctcctgaaggctcggctcacctgagcaataaaggtgctactgacggttctctaggaaatcaaggcgacaacccccaaggagtccatggagtacaaggtgatggagcgcatggggctcaaggtgatggtgctcaagggccgcaaggaggaaattttaatcagaacagtgaactagcacaggattttttcaataacttccaagatcgggtcgattacgctgtgcatcatgctttgatcaatcagtcaggagtactagtcaatacattgtcaaacatgatgaagacaatagccgatgactcaatagctgagcatcaggccgcaggcccggtgtatttgcaaggaggtgtcttcccgaattattgatctttgatcaccgatgttcagccacctgctcaagcagttccctctgttgcacccacaactcagccgacggcgccaacatcaactcctctacctgctacagcagccatggcgccaggccagctgatgaaccctcggttgttaatgagggaacatccaaagtctactgggcaaatcgcgaatcagccaacccaagatcaagttgctgccatgtttttgccacctccacctattgttgatctagtgcagcagcagccgattcagcagacaccaccaatccagccagttgtagacccgatccaacaacaggtcgtacaaccagctcagcaaacaccatcaagacagcagcctctgcaaccgattcagcacacgccaccaaggcagcggcttcagccgatccaacagactccggtgcaacagtagatcattcagccgatttagcacccggggtcggcaaatgtatcggccgggttcatagcacctggtgggcaacctgcgcagcaatttgtaaaccaagtggtcccagagcatttggttcaccatccacaaccggatggcacggtggtgcctcagatggttcctaagcacttggtacgcaatatccagccggatcttcataattaccaaggaggtaacttgagctaccaatatcagcttccttccccgcaagcccaatatcagccagggggattggctcagccctagttcgcaactcagtttagtcaatttgagcccttgcagcaacaaccgaaaggagcagctcagcaacgaccatgggccgatgtgattgccgatgtaatgagggagcaatttgggcttaaaccaaaagaaactggaagtttgtatcggcagccttaccctgagtggtttgaaagagttcctcttccccattggtttaaagttctagatttctccaaattttcgggacaagagggtgtgtcgacttatgagcacatcagccgattccttgctcagtgcggtgaagcatcggctgtagacgccttgagagttaggttgttccggttatctctgtccggatcagcttttacttggttttcctctttgccatatgggtcgatcaatagttgggccgatttggagaagcaattccacagctatttctacagtggggtccatgagatgaagttgtccgacttaacagcgatcaagcagcggcatgatgaacccatgcacgagtatattcagaggttcagagagatgaggaacaagtgctttagcttgagtttaactgatgctcagttagccgctttggccttctaaggtatgattcctccaatcagggagaaattcttattcgaagacttcgatagcttatcgcatctgatacagaaggtaaccttgcatgagcataggtcggcggaagttaggaaaagctctaagaaagttaatcacgtttgtccatatatgtatgggtcggatgacgaagaagatgattctgagatagctgcagccgaatgggtgaggagtaagaaagttataccatgccaatgggtgaaaagtcctgggaaagaggagaagtatgactttgatatcaccaaagctgacaagatttttgatttgctactccgagaaaagcagattcagcttcctgctggtcatacgatcccattggctgaggaattacgcaagagaagatattgcaaatggcacaattctgggtctcattctactaatgattgtaaggtctttagacagcaaatccaggttgccattgaagggggaaagattaggtttgatgattccaagaagccgatgaaggtcgatgggaatccttttcccgttaatgtggtgcatacagctggtcaagcagccgatagagcccgtgcaaagggttttcaagtaaattcggctaagattatcaacaagtatcagaggaagtatgataagcagcaggaaaggcgttacgaaggatacgacgatggttttgatcctcattggggttgcgaattcttcagattctgctggaatgaagggatgaggttgccatctattgaaaactgccctggatgcagtgatatcatcgagggctcaagccgatcatataatagggataatcggctgagacaggcaagactccctgttcatcagagattgggtccgatgaatcaggattgtggccaagaggaagaagcgatcaggaagaatcaatggtgtccttctggtattttcacgaagaatcagaagaggagggtccatagattgaggagcagggagcgttttcaggaggttgaggaggaaatcaaccatcggctgaggaaaccaaagccaagacaggagtggcgtgtcaagaatcaggttcccgtagccgatgatgctgcagctgatgaggtgaagaggttggcaaaatgaaagagtgttatagcggcaccgattaacatggtctttacattgctagctgaattcgggatcgatcaggccgatgttgacgaagtggaagaggagtcggctaagttggtcctttcgccagaacaagcagtattcgagaaacctgaggggacagagaatcggcatcttaaaccattatatataaacggctacgtcaatgggaagccgatgtctaagatgatggtcgatggtggggccgcggtgaatttgatgccttatgctacgttcaggaagctgggtaggaatgccgaggatctcatcaagacaaatatggtgctcaaagactttggtggtaatccatcggagaccaaaggtgttctaaatgtggagttgacagtcggcagcaagactattcctaccaccttttttgtcatcgatgggaagggttcgtacagcttgttgcttggaagggattggcttcatgccaattgttgcatcccttcgactatgcatcaatgcttgattcaatggcaaggcgacaagatagagatcgtgccagccgacaggtcagttaatgttgccagtgtcgatttagccctttgggagatggatggccttgattgtttatctggaaaagtctgggatggagattttctaaaagtgtccgattctgatatatagccaatcgaagatggagaacccaagctattactttgagggcgtcgtggagggttcgaatgtctatgctaaggataccgtagatgatcccgatgacaagcagggccaaggttttatgtcggccgatgatttggaagaaatagacataggtccaagcgatcggccaaggccgacatttattagcaaaaatttgtctccagagtttagaaccaagttgatagagctcctaaaagagtttagagattgcttcgcttgggagtactatgagatgcccggacttagccgatcgattgttgagcatcggctacctatcaagccaagggttagaccatgccagcaacccccaaggagatgtaaagccgatatgctcgaacttgttaaagctgagattaaacgatcgtattatgctggttttattcgtccctgccgatatgctgaatgggtctctagcatagttccagttattaaaaagaatggcaaggtcagggtgtgcattgattttcgagatttgaataaagctacaccgaaggacgaatatccaatgccagtagccgatcagctggttgatgccgcatcagggaacaaaattttgagttttatggatgggaacgcaggatatcataagatctttatggctgaggaagatatccataagacagcttttagatgccctagtgcaatcggcttatttgaatgggtcgtcatgactttcggcttaaagagtgctggagcaacataccaaagggccatgaattatataaatcatgatttaatcggctggttggttgaagtctatattgacgatgtggttgttaaatctaaagaggtggaggaccacatagccgatttaaggaaagtttttgagagaactagaaagtatggcttgaagatgaatccgacaaaatgtactttcggtgtgtcggctggccagtttttgggatttcttgttcatgagagggggattgaggtgactcaaaggagcgttaatgcgatcaagaagattcagcccccagaaaataagacagagctacaagagatgatcggcaagataaattttgttagaaggtttatttctaatttgtccgggagattggaaccttttacacgcttattgaggttaaaagccgatcagcaattcacttggggggcagagcagcaaaaggctttggataatatcaaggagtatctcagctctcctcctgttttgatttctccacagaaagggataccgtttaggttatatttatcggctcaattctgattcaagaattggaagggaaggagcgagttgtgttttatctcagtcgacgactcttggatgctgagactcggtattctcctatggagaagttatgcttgttcctatatttttcgtgtatgaggttgaggcattatctgttatctaatgagtgcactgttatatgcgaagccgatgaagtcaagtatatgctgtcggctccaatattaaagggacgagttgggaagtggatattttccttgactgagtttgatcttcggtatgaatcaccgaaagtgattaagggacaggctatagccgattttattgtagaacatcatgatgattcgattggctcggtcgagatggtgccatggactttattctttgatggatcggtatgcactcatggttgtggcatcggcttggttataatttcccctaagggggcatgcttcgagtttgcctatactattaaaccatatgcgactaataatcaggctgaatatgaagcagtgctcaaggggttgcgattactcaaggaagttgaagccgatactattgaaatcatgggggattctttgctagtaatcagccaattggtaggagaatatgaatgcaagaatgatacattgatggtttataatgagaagtgcctagaactaatgaaagagtttcggctggttactttgaagcatgtatctcaggaacaaaatcttgaagctaatgatttggctcaaggggcatcggggtataagccgatgatcaaagatgttaaagttgaaattgcagcagtatcagccgatgattggaggtatgatgtgcatcagtatttgagtaatccatctcaatcggcttcccggaaattaagatataaggcattaaagtacacattgttggatgatgagctttattatcggacgattgatggggtattacttaaatgcttgagtgctgtggagattatgggtaccccatacccacacggcatggttatccgactggttataagggataacttatatatatggaatatgtaacagatcatgacttgggtattatgtttccttgtatattacggaacggcctaaagtcctggtttgataatattgtaaagtagatttaggaaaccgataccgtattggttaaggtttctatcttgtaatcctgcccccatcctatataaggtgggcaggaggccctctagagggcatgattcacaattagatcatcagatctataatacacccggcggattcaaatccctaaacaggagtagggtattacctcccattgagagggcctgaacctatctaaatccttgtctccgcatccatccacttttaggtctcgtgcgctatccccttttattattgccgaattcttgtttcaacagttggcacgccaggtaggggtcacgccgagtttcctgccgatgggtgcgatggaatcaacttcatgaatcgccgcacgccgaaagcatcagcatgcaacagaaaaggccaagatcgaccttgacgagttcgacgaaatcgatctccggcatcagcacgccacttaagatcgctgcaacttgctgagattggttctgagctagcatcaacagaaggaattaactactcatgcatgctccttatcatgacgagttactcgtatgtctgtcatcaaaaattcaattatcgccttgaatcagagattggatcagaaatcattatcaggattttccaaccagcggctactgtattttgtttgccaaaatcctactcggatacggttaatatggcatgcaagcaacaactcagactctctgaacagatggtctggccgcctgtgacaagcccatggtcaacattagcacacttttggaggataacgctgagaacaagctaagtgtttttattttcctctttatgtaatattttcaattgagcgattctttatatatgctcatgcaaactacttgtctacaccggacacctagtttatcattattattcatattgatttttaatctcagattaatctcttgctattttttgttgttgttcacatataaaattacgcggcactattgaggcgattgatgctagtcatggactcgaggcgtctcagctttctggtcgatcggccgcgagtccactctgccggcttgtcctcgccaccgccattgctaatagcaacaacgacttcaccgccggcttgcctccgtcgccgccgactggtgtctctgcctacacggttggcctgttatgccgccgtcgttgggcatctacgacttcaccgctggctcgcctcatccgccgccgactggtgtttccgcctgcacggctggcctattatgcccacgttgttgggcgtctacgtcttcaccgaccggccgcctcatccgccgccgactggtgtttccgcctgcacggctggtctattatgccgccgttgttgggcgtctacgtcttcaccgatcggccgcctcgtccgccgccgactattgtcaccgcctgcacggctggcctattgtgccgctgttattgggcgtctacgacttcactgccggcctgcctctgtcgccgccgactagtgtcctcgcctatacggttggttggtcacaccaccgtttatgggcatccacatcttcaccgaccggcttgccttcgtcactgccgactggtgtctccgtctacacggctggcctattatgccgctgttgttgggcgtcgacgacttcaccaccggcctgcctccgtcgccgccgactggtgttctcgcctatacggttggcggactccgccaccgttgatgggcctcgtcatctacaccggcttgccttcattgccgctgcctggtgttttcgttgctattgatggatggtttcggtcctacatcggcttcttctgttgtcgccgagggaatacaaaaaagctaagtcatcattaattttctttatatgatattttccttttcctctgcctcactatgtcaactggttcgccgttgactattgagtcgggggctacagatattatatcatattttttaaacaatttttataatatctatcttgattgcttgcgacataatctgagtacaaaagtgcctatcgagttgtggagttctatctttctatgctttccgtttggatggaccgggggctcgttggatggaccgagtaacgcaaggtgctaagtattcttcggaataaatcaaaagcatagagataagataaatttattttcttctcttaacaattgcaaaagtacctgagtagtaaattcagattcgtgaaactttgttccattattgacaaactcatgtcactcatatgcatgtttgggaagtgcctaggccgactcccgatgcttgggggctatgattagtcgaacagagcgtttaaacgtaatgagtcatctgctcgggaaaatcaaaattgacaagaggagaaatacatattcacaaacattttaaaatgtttgaattttccttgagtattatatttatatcagatactactcatcctatatgtttgttctgcaggatccagatccagatatgcacaaaagggattcatggctttaagcttatcccttacgctccaggaatggatcagtcagaacatcaccaccggcttgccatcgtcaccgccgactggtgccttcacctatacggttggttggtcacaccaccgttgttgggcgtctacgtcttcaccgaccggcttgccctcgtccgccgccgactgatgttcccgcctacacggctggccttttataccgcactttttaggagttggtacaatgcatcttaaaaggtgtcaaacagtaaagctttatatagctgctccgctgacttttttatatagtcatgacgctgtttgggtttatcaagcaattgattggatacaatatcattgcttttcgccacgtaagtgtgcatttttattgaccaatattatggcttaggctgattatatatcttagtcattttccaggcggttggtaaatcctttatgagtttatttactcggatttcacaccacatatgccgtatatttccgggtgtggtgaaaccatgtgtcttttagggacttaagcacatctgttaaagtagtgtgcgcatggcgtatgcccaatactttggaaatttctttattcacaacatacaagcttctttatagctgttttgctatgtgaattttcaatgatgtagccaactttaggttacactcatcatattttacaaaggagtcggtatatcactcggatcatgttattcagggattcacaccgcatatgctacatattaatatcaagtcgcttggttcactataattatcgaaaccactcggttggttggattatttattccttgactatatgcttggtttgttcaattaaccacatagtcgggggctacacctattaggggctacacctattagggctacacctattttttagccctccacagtcttctgatttggtaaaagtactcgggagactatggcaaagatgattgaagcactcggctttggagtaatctggttcaagagaagattatcttttcgactgtgaaggtctcaggggctactgtggagattatggtaccccatacccacacggcatggttatcagactggttataagggataacttatatctatggaatatgtaacagatcatgacttgggtattacgtttccttgtatattacggaacggcctaaagtcctggtttgataatattgtaaagtagatttaggaaaccgataccgtattggttaaggtttctatcttgtaatcctgcccccccccccaatcctatataaggtgggcaggaggccctctagggggcatgattcacaattagatcgtcagatctataatacacccagcagattcaaatccccaaacaggagtagggtattacctctcatggagagggcctgaacctgtctaaatccttgtctccgcatccatccacttttaggtctcgtgcgctatccccttttattattgccgaattcttgtttcgacaagtgccgatcaggctaaggttgcaatcggtgaagttcacgaagggatctgtggtactcatcaatcggcccataagatgaagtggttgcttcggcgtgcagggtacttttggccgacaatgctggaagattgtttcaaatattataagggatgtaaagattgtcagaagtttggagtgattcagcgagcaccggcgtcggctatgaatcctattattaaaccatggccgttcagaggttggggaattgatatgatcggtatgataaacccaccatcgagtaaagggcataaatttatattggtggcaactgattatttcaccaagtgggtagaggcgattcctttgaagaaggttgattctggggatgctattcaatttgttcaggaacacataatctatcgatttggtcttcctcaaactattactacggatcaaggttcaatcttcgtgtccgatgagtttgttcagtttgctggtagcgtgggtatcaagttgttgaattcttcaccttattatgcacaagctaataaggttgttggatcgattcaagttcctccttacaaacttgtttatggacatgaggttgttttgccatgggaggttagaatcggctatcgacaaacggagttgcaaaacgatttaacggctgatgagtattacaatcttatggctgatgagagggaagatttggttcagtcatgattgcgagcccttgcgaaggttactaaagataaggaacgtgttgctcggcattataataagaaagttgtgtctaaagatttttcggagggagaacttgtatggaagctgattttgccgattggtactcgtaatagtaaattcggcaaatggtcgccgaattgggaagaaccgttccaaattcataaggttgtttctaagggagcatatatgttgcaagggcttgacggggaagtctatgggcgagcgctcaatggtaaatacttgaagaaatattacccaagtgtgtgggttcacgcatgatcggctactattgccgatacatgacagccaatgtgtttacatcgccttgagatggccgatattgttatatcgcccttagttgtttttataatgtaatcggttgtggtttgccgatgtacaatggccgatattgttatatcacccttagttgtttttcatggtgtaatcggttgtggtttgccaatgtacaatggccgatattgttatatcgcccttcgttgtttcataattttatcaatgctctcgacattgtaaaattaggggggcatatatatatcaacatgtagtagtataaaattttgagcaaatttcaaagtcatattaatcagcacaaaggattgttaagacagtagaatatcagaatgtttcagttgattataaaaattctaagtcctattacacaaagattattgagataagtatcgctggataaccgatatagctttctgcctaatctgttctatttcttctatggcttgggcatcttgagcatcggttccagggataactttcagggacttggttagttcggcaacacgcttttgccgatttgagtcttgttttttgttcttcaatagatttggggagatcggctagtttcttgtgttccatatctagctcagcattacattcttcaagttgtgctaagagttcatttttgcgagcctcaagccgatcaatgttagatttgattgggccttcagataattgatcaagcttggacttctcttcatgcacaagttgtcggttggcttggatagtggcttcaatgtccttacgttctcgccgttcggctagtcttaacttggcttttttcagtttgaattggtgttgctcaaggtaaacagctggagtaaggatatcggctgattcatctgggattaaggcttgaatctcatgcagccgagccctgattgagccacagtcaactaccaaactatctagctatgatgcctctagtcgatccaaaatacttcctagagttttcttcacatcatcagataaaggagccaatgctttgcttgtggtatcttcttctccttcatcaagatagtctctgatatcgaaagagaaaagatcggctaagacctgcagtgacaatttagaagcagttagaggttaaacaagtgtagctgatctgaatgcttgttatgataaacgaaatttactgggatagcaggagcagctggttgttcttcttcctcgacgtgataacttcccgcagctaaaggggtctgatcacttgatgattgttgaacaggaggagaaggaggaggtgaaggctgaaaggaagcaagtgtaagatagaatcggctaaaaattaactaatgaaagtcaaaactatcttactggtgaagctggtttagatgttgttgcagccgatttcttcttcactgcagtcttctttttctgcaattataaaacttgggaatgatcagctataagacaaaataatcacgaaagagattaacgagaaacacttacccttgagaaatgaaccggagcagaaggagttgaagaggtttgtttaggcgaagccgatggtgttctttcagtgtcacttacctcggctgcggcctgatcaacctcgtctccaatggcctcttcatccagagcttgttcgatggatggatccagggtaggcagatcatcagctggcttggttttctttgtcttcttctccttaattggggctatgatgcttacagccgatgatctggttttcctctttttgccggcatcggctggttctctaacgagcccttgaagaagagttgaggtcttgggggcatcatagccgataactggaggagatagcccacctccgttaggaatcaaacctggggcacactggatgtctttgccgctgttgctttggtgaggaggggaagattctgttgtctgcaaaccaaaaggatgattggttaagattaatggccaaacagttatttaactaaaattgagcgaagttagaggcttacttgaggaacaacatctggaaagaggtctgtcatatacatcgaagctggttggtgaaataaatgcagtttccattcaccccactacctatcgaaacttttgcttctgaatgttgccagttctatgttgccaatactgcccagagggggtccttgaaggctaagcagccgatccatcatcagggttgatgaaattcctcctcggcattggatcttgtcggcaaagaacaagccgattgggagttggcccattccgagttgtctagctgagctcattggatgatagaattcataagaagcttggatgtttcttccttgatgaatgccaacagggaggacacatgggctgattgcagccgagaagatttccttggatgattggtatacttcagggttgatgtctttgaatctgaagtccactgggtgctcaagttgtgcagagtcttcataaagaaaccagattctagcatctttctgaaaaccttcatagaagctacaaaaccaatccttgagcagttcagccaatagttttgctccggcatcagttggtgtagaagcgtattctccatatgatgtgcatctccgatgagtacgctcttctctatcattatctacaatcggctctagtcttgggaattcagtttttgatacggatggccgattgacaaccttcatgactatcaggtttaaccaggtttgcagtagccaccagggtccacctgctccaactactgagccgactgctatcttagccgatgcattgctcagcatctggtttagatagccgaggagaattttgcccaaggggaattgtctctttgtttctagagcttcagccagaaattgtcagttggttgttgggccacaacttgatccacaaaaaagaaatttttctagccacattaataggaaagccacatgttctcgaggggtgaccaagccctggcccatgtatgctgccacatagcctgaccaaccccctatacttttggttttaaagtcatattggttctttgtgttcaaactcatagggttggccgatgaggtaacatccagacctgtgatcataatgatatctatgagagttggagtcatcagcccttgattgaacagaaaggcattggtagtgtttgaccagaagtaagaagcagctgccatcaggggttcatctttggccgagttcgctatagtaaggtcaagtgcttggccgattccaatttcatcccagtgaaccctcttgctggctgatacacgtttgaaccatgtggtccagctcttttctagtggaactttctctagggatggctaggatttgaaggtattcttccagtgacctagatctgggttggttaatctgaaggggatactattggattcaccaataataaactcggtggggtctggattgccgattgggccaagaaagtagtgactttcatgcgccaggctgggaatcgcaactaggttggaaaggtgctgcaaatccaaagcaattcagagggagagagtgatatcagattgaagaagatcgatttgctgctaaagaaggggatttagccgatgagaaattacctcagcgtattcggccgatggtgcaccaagtgggctggcggaagacgacattggtgcgggcggagatctcgccgggaaggaagtcgcctaagaatcgcctttgcgccgggggaatcgccgagaagagagagaaaaggtttcacttgagcggtgaaaacggaagtcacagcgtgagatttctcaggggtaacgggtagtgtttaaagcgctggaataacggttaaaagtggcggagtgcgagacttgctcggagtcagcttatggcaaatccggaacattatcaaatatcccggacttggggggcatgtgttaacaaccaaatttggtagcatcagcgtcggagagaagattagatcgaagcaaagtcggaagtggagatcgagtttgaaaacagggcaggaatcggctgaagtccagattggctacgacaagatcggctgagtctgagtcgagctaaataagccgatatagccgattccgacaatacgacttgtgcgcgacattgggttcaagttaatgtacttcaagatgattaccacgcatggatagagtcctgggaaggcaaatgtatctattaattaggatattttatgtgaattccttatagataagtgtaggcaaaagtctgccgcaaagacttgtggtatcttagagtttgttagagataatggtcgtgtccggtatgggcatatcttgtaatcctcgggtataaatagatcccgaaccctatgtaatttttaccacacacgttcaacacaatcttggcgcatcgccaccctttttactttcgttttatttcgacgagttcttgctttcgggttgagctgcattggtttcgatcttcaacaagaggtaaacttgttatggcggcttgtgttctcgagattagtgcctccatctttatgacactctaatcttgtttatgtaattcgtcgagttatcatatgtcttacataatctctagcaatatcatcatctaacctagcgtcggttaatatctgtcaatagagggtagccgattaggttaaatattgatattggtctagattatatgagacatctaccgttctatgagacttctagcggcttgattgtctagatattgttcttcttttcatacttaatgctgcatcagttaagtctgatctattaagtcgtgcttagaatatcaatccctagcctgccttttagttgccgattagaatagcatcggagtttcagccgattgtatctgatttaactactctttatcctatatgcttgattgacatgttaaatctgccctttgcgttaagatcttgctgcatttaagtatattaggcttttgtttagtatattctacttgctttaacatcttaacatatagtggtatcggagtattagccgatacatgctagatctatctgatcggctatgctatgaacgtatatagtccaattattaatatatatttcgatctaagtgatttatactatctcggcatggcgaccgatctatcccaatcacttgatttaagtatatatcgatataaggattatatattgttaatatctacagccgatcgagtagatttagttcttctttacctattcattactgccgatcgatacatggatgacatcggcccaaagataaatgatatgttatcggcatctagccgatcggctatcatttatagatttaactacggtttctttgcttctatttcttgttgattacaggatcaaatcaactggcacgctaatatatccgaaagcgagctttggacctgcactggagttaagcagatctcccaggccacgtgttttctgtcaacaaggttcaggccttcttattcaagaagtaataccctactcctatccagggatgattccaccgagtgtattattaattgtatgatctgggagaaaatcgtgtcccgagagggacccggacccctccttatataggggaaggggtccgtattacaaaatatagtccatatccctaacggaatatgtgattacagataaaatacaatcgtaaccgactaggatcccgggtatttccttgacatacaaatttagaaactaacccgagtcctcataaagatattctatatatattcggtaccctgtacccaactagactataactgccgtgtagatatggggtatccataatctccacagaagctgcctaagggcacaatgttatgcactagttgcatagtagggcaacagacaaaatagttttaatcaagtaaaatttgtttttatacttgagtttttgcaaagcaattcgtgaataggatcaaagaggcaaaagcatcattccagccacatggtaaacaacctcacacttagtgttttggaagatgttttcaaaagtttgcgaaacaaatctagccttcctttgaagcctgcatactcatatttccctgtggcttgcttagtatgtatgtactcaacctaatccaagccattgcttgtgtattgggggtctaactacacttggtttcgctattgcttctcttcttgccggtaacccttggggagttgctccgaaggtgtgaccttctaaaggtataaactatctatatattatgttaaattgcaaatgatacatctagattgaccgtggtaccaataattttgtcctgggactggtaccagtatcacgttttgtgggagttggttcgcgccgattttctacggcataccctctcttttgttagagttaggtggtgcaagggtggggtgtgacacaccgctagcattagcggccccgaattcctgatcctatatctaggtgatatgagctggacctcctcctaagagttgagcggcagcagtttcccaagcacgatgcaggtaacgatagtcgaaccgggtcgatgggatgtgattggatacccgaattgccatggcccatatctatatggcaccgatggtggagaagagcaacagcaaagtcgtatcccctagagtagcgtagacagcccgataggtgactccggcaaggaagaggcgttcgttcccttgcagatattgatcactgcccatgctctggaatcccggctgccatcttccttgtggtcgcatggcttctgccgcactccactggagacaaggtggagatgtggccccaacatgacgacaaggggtagttagatcccgctgcgaagtcacgaatattcattaggtaaacaattgcttctctatacaagagataattgacttgtcttgcaatactttatttttagtttttggatgctaattgttttgaagttattgactccctcaaccattcaccctcctctatttgcatagctcagttcatttaatcctacataatgcttgctcaatttaatcctataatttgatcatcattcatttctacttattgaatttgttgctacatccatgagaagttgtacatatatatatcaatacaatgccatcttattgtactatagacggtggtggtgcattaggtccgcagaaatcacaattgcatgctggcccttcaatgcagttgcctcttgcagcacccaatgcaaggcacttatgtaggcaaacattggggatacacttgtcaccaatcataataactgctggagaacaatcagcctctggattgatgttgctttctgcggatgcatttgctaacttgtctgcaaatctcaagtagaacaaagatctaaacaatttcttcacgaaaacaaaaaaatcaaaacagcaacaaagcttgataaataactatactacatgtatgattagccgagaagcatacttgatgacaacagcacaagggcgagggtcaggagcaagagttgactgggcctcatcttgaatcgcttttgtcaaatgttaacagctagagtgttgactaaattaagtgttctgctgttgatggtaatctgactgggagaagggcttgtggaattgcagatgtcttatagcaaacaagacttgctatttttggaagcacattatgatagactagtagataagatagataagctatttttggaagcacattatatataatagcagaaattaaatgtaatcatcaatgtggtatacgtgtactctcttagaggataatacagtcaataaataatatatgggggttattgtttttgagatatagcctcatttggctctatctcagcccagcactacagaacaccctcgtgacttcagcctaacttccccccaaatatactagtctttttttcgattacatggaagactaacgcacaaaatttgccaataattgattctataaatacttacagaaatttaatatgatgaggagagatctcccttacaacacaaatttgaaaggaccgatatcttaatttatcatttattttaagctgtgtgtagctagacctgctttaatgccaaatataatcctaaatcacaagacattgagttatatactttacgaggcccaaacttgtactccctccgtttcagattataagactttctagcattgcccacattcatatagatgttaatgaatctagatatatgtaggtgtctagattaatttaacatctatatgaatgtgggtaatgctagaaagtcttataatatgaaacggagggagtataaatcaatctcatctattgggtcttctatgcttacctggtgatcaaatatcccctccttaatattatttatattattgactttatcattcactaatattaaccgagagattggtgtagcatgtataactatgaaaagaatgttgttgtggttgtatccttcttaatttgcaaattaagttatatcaagaaatgttttttttgcttctgtttatcatttttttttcctttacaatattacatgttctttttttactttttagtgcttgaaagttagccaaggcctaattggatagtttttgtacatatttttctttgtgtccttttaagtattgaaacaaattgaagaacaagcatatgagaatggttcattttcaacattcctgaaatatataatttttttgaaagatcaccggggggagagcttccccacctaaatagctttcattacttgaaaggtgttacacagggcaagcatcatacgcgaaacacaagtgcccaggaggatgaatagaaggattacaaagaggagaaaacacaaggaagagaataaaagtgcggggagagcacaagacgttctacaagagaaaatatacaaccaaaccccaaacaaactagagttagcatcatagcttgctgacaagcaaaaaaacttgtcagacatgaagacatccaccctgcaatccagtcatggaacagccaggaatccagaatgctagagggccttttgcgacgtacacaagcacgatccctagtgtccaaaggttgtggttgaagatgaccacctgcattaagtcatcaagaatcaaactttagcatgttgatctaacatttcccatcgacgccgtttggaggaaggaagccccaaagggaatggtaactgaaggttgcggccatagaccacccgcatcaagttttcaagtgtcaggcttaaacatgtcaccaatctgatcaccgccctccaacgtcctttgggggaaggaagccccaaagagggaggggcatcaatgttgtgggaaaaaaacaatcaagcgacaacgataggatgaagcacagaactaggcaaaagtgatctgggaaaggtagcaaacttttgggtagagcaaacatcgacacaacagcatcaaggaggcgtgggtagaggaaagcacagctcaccagcgcagcaaccaatctattccagaaatcagttgaagtcggaaaactcacccaataagggagggtaggaagaaaagggaaccatgtgagtttcggcccgaacaaagacagctagagtaggctgggaatcacaatagttcgatgtgaattggagtgtgacctaagcacaaccatagagctggagaataaagggaggaccatgagaggagggaaagtggagtgagacaccgaggagggcggagcaggggagaacgatatggaaggcaggatgcatttgacgacctaggagttccaaaagcgatgccttcaagaagggaacaacatcggaatggatgccaccatcgcacatacattggaatagggctttcgcgcagcaccccaaggcagaaggagcatggatgctacgacggcacctccagggagggacatgatgtccggggacgtccattgccactggtccagctttaagttgggcagagctttcgcccatcacataccatacacatccttctacactgccaactgggactaaagatcataaagtcccattgcaattttaaaccggaactaaaaatgatccttagtcccgattcctattcaaaccgggactaatatggttttcgcatgaaccagcaaagatcaattctccagtagtgcacacacacacaggaaacacaaccccactgaacgatagggcaagatgaggcggcagatcaaaaaccttgcgtcttgccaccgtgacagctaccacccctcgccgtagatgaagccctatggcaagcctcggcagatcagccggatctagcctcgcaggcggtggatctgggcgccacctgccactcccctcacctgccctatggcaagcctcgacagatcagccggatccagcctcgcaggcggtggatctgggcgccacctgccactcccctcacctggatggtcagcatgacgcaccggcccctaggcagccggtccgatgcactagcctaggcgtagtcgacacaaacgcctggtcgatggagggagaaggcccttgcgacgccatccaagttgttcgccggacgctcggtcaacagcctccagatctgaagtggagaggagctagagagagaatagaaggggatagaggtggagagtggaaggaggtggggagtggagggggacactgccagtggtggcagagagcatcgtggctggcgatggtgaggtggttggctgtggtttctcgggggttccggcttatggcctcctatcccacctgagacgagcgagactggagtcctcttcttagaattggttacagtaggagcaatcagaaaaccgaatagaactaaacaatgttctttcccgaatggcaattattgagcttaacctccccaaattcggtggatgctcggttgtaacttggagcaagagtattttggttagagttacagtagcaacaacagatagaacctgaacaattccttctcatttccatcagttcacacaacctacacatgatccacaaaagtctgcttggacatgcctccttgggttcgcggcgcgttgtattccagcatggatgccgacctgatctctaggctgccatggttgctgtctgtttgttgatcctgatcattacccggtaccaaatgaaccttgtgattcttgtgatgatcattgtctgggctgtaagtatttgttcttggcacctgctgatcttgaggtgcaggtgaccccttggggaacacctcctgaacctgtccatctgaaaatcgttttgaatcttgggctgatttttttgtatcctccataatcttctcctacattagccagtatgtgtgaaatatgtttagagacaattggagagctaataacagatatcaaaacgattaagtttcgtctttggaatagcttttgtcagactcagagcaattaagtttcgtctttggaatagcttttgggcctgtttagttcgcgaaaagaaactttttgggtgtcacatcggatgtttgaccggatgtcggaaagtgttttcggacacgaataaaaaactaatttcataactcgcctggaaaccgcgagacaaatcttttgagcctaattaatctgtagttagcacatgtatgttactgtagcacttatagctaatcatgggctaattaggttcaaaaaatttgtctcacgatttcccccctaactgtgcaattatttttttaatatatatttaatacttcatgtatgtgtccaaagattcgatgtgatgtttttaggaaataaatttggagagctaaaccgggcctttgtcagactgtgctcatctgttcccgaactaattgagcatgcagtgacctaaagcttagctcaggtaagaaatgatagaaaagataggttttatggacatagattttctacacttaaatgctacgacacctgtcatttgtgtacgtctcaaaattatatatttttttaaaaaaattagtaacattaattcggatgatacaaagtctatatgctaacatgcaagactatatttgatcacaactagtgaaaaaaaaatcagacagtgaatagtaccactttagcatataaaatatttgctatttttgtttcttcatgttagatcaaatttagacttacatgtttataatgtgtcttatattaatgttttatataactatttaaactataaactatatgaatacacctaagtaccaactttcccgggtttttatgattgtttacctctttgttactaggactactgttgagattttgttccttatctttatgctgctcctcagctttcggcttgttgtctcttcgcttatgtgaccgctctctcagtttgggcctgcatacatatggacagaaaaaaaatcatgagccaggaaatctgcaaacgaaaccgatcgaacagtaaacaagaacgcaagttcagagagatggaggtgaaaattcagtcatatatttctcacttccttccatcatgggaagcagcaacctcatcctcctccttgtacacaaccggaagctccgacagatggcacggcaatggcggcgtgctgaagaactgcagcagaagaagcagcagcagtcaatgtcaatcaatggatggcactgcagtacgctgacacgggcggcagcggcggcggcgtgcgtgcgtgcgtgcgtacgctgctctgcagggcctgggcggcggtgccgcgggcggcggggtcgagggcgaggagcgtggcgagcagggcgagcgcgggcggcgggaggaaggcgatcttgtcgaccatggagggcttgtacgtcctcggcgggcggaaggtcggcggcagcctcatcttccgccagtagtcgtcgggcggggagccgcagagggtgaagatccgggagagctgctcgatctcggttcttcccggcatgagcggcctgccggagaacatctcggcgaggaggcagccggcgctccagaggtcgatgccgacgccgtagtcggtggcgccgaggaggagctccggggcgcggtaccagagggtgacgacgcggctggtgagcgggcggcggcggccgtagtagttggcgaggccgaagtcgccgatcttgaggacgccatggcggtcgatgaggaggttggagcccttgatgtcgcgatggaggatgccgcgctcgtggcagtgctgcagccccgacagcagctgctgcatgtagcattttatctgcacaaatatacccgctttgttcttaaaaaatatagactaaatttcaccaaactatagggattgtggcacgtgatatataaccccaattattatggtcataaaatttcacaaaatcacattgtttatcattttaactttgctctatcatacttttgagttctataatcacatttcaaatttattgtttatttattcatcatagaaatgttttaaaattttgatacaggagtatgtcaatttggttaatggcgtggttttgtgaaactttaagagcataatgctcgggttatgtgctatgttaaaatcactgtggttttgtgcaacttagactataatagatgacgaagcatgaagtttactaaataaataaagccagttttaaaattcaaaactaagagtgaagcctagttttaaacccaaaactagtgtacacttctggcccttaactttttgcatggtgggctgtaaaagagtgtttggatggcaagtttccggattaaaatccgtccaattgggcccattatacccaaaaaaacaaaacacctaaagagcccacacaataattcgatttaacttggcgctcttctcattaccctcctggttccacgtggccttgcgaaccagcttccacttcgccctactgccactgctctcggcttgctctcgacctcatggtcgggcaccgctcccttctccaccctaccattaatagccttcgtgctcagctttcttttgacctcatcggcaccactctctactccaccctcgatccacgttgccaacatctttccaacctcgatccatgccacaagcaggcatcgtcttcaagacattggcaccatctcagcatccacatgtgcaggttaggcagctagtttcatggcgatcccctttcgagttgctggcgtcatctcagagtcatgttctacaatttgtgggccactcctcttccaatctagtagttcagttcgaatttccaaggtgtcatgttgatgattgttctttttaacattgctatccaatttgatgttctgttttgaattctaattttcaatttgtggttttataactaggtgacaacaccccacaagttgatgcaagatatcgatttgcacactatgattagaaaacaaaaatatatgggtaaaaaggtcataaattttattgacaatttaaatgtctaatccaacaacaagaaattaaatgattcatgtaggccgttagaaatatatgattattatctaaagtgttaaagcactatctagattctgaagaagcccttttttatcttagaaaattagaaatatatgatcatctaaaaaaatcagctgtcttagttggttcaagaagaggaggtccaagagcaaggggctagggaggaagggccgaaggggtggtgtatgcgtacgccgacggtattggcgtggaacatgagacggtcaaacaactccggcataaaaagagatggagaacaaggagtgagaggagggagaaatgagagagggccggggatggcatgtggaccatatattttttatttttttccctaaaagacttagacttgtatatgcattttgtttcttttttcgacttgaaatattatgtaagcttcacatcacataaaaggccaggttaaaatttcaagtaggtgttacctaggacgaaaccatcatcaaaaaccgtttaggaaggtaaatcgatctaaaacttaaaggaaatctctatacacagtttggtactttggtttgatagttgaagtactcgaatcaaattcagcccaaagttgaaaccgaatgaacatttgctagcctagctatccaacataacaacaacggcgaactagctagccagaacaaaattgccagcccagctaagttttgacttagcccattggataataaaatattccgggctggccccgtctgaaaaccaccaaaaaccagaaggaacaaaagaggaaaaaggccacgcatgtggcaacaaatggaagcagcaggctgcgtatccaaggacaagatatcatcaagtaatattgatgtgaggaggaagatggccggtgtgccggctgtgtgaggccgtgctgcatggccattgcccatggcggcgtgcgtacggcgtacctggggctcggtgaggcggtggtcgggacggcagatgatgcgggtgaggtcggagtacatgaagtcgaagacgaggtagatgctgcggtgcatcctggaggtggcgatgccgtcgaggcggatgacgttcgggtggtccagcctccgcaggatcatcatctccctcgccatgaaccgcacgctctccgactccgacgtgtcgaaccgcaccttcttcagcgccaccaccctccccgtccccctctcccgcgccttgtacacgttgctgtacgtcccctgccccacctgcaccagcatccatccatggcggccgccgccattagactttcagttttagctgtaattaaggtagctagagacgccggccatggaggcatggcggtgcaggtgcgtgccttggcgatcttgtcgtaggcgtcggcgctcttggggacgatcccctgcagcgcctcgcggggcacgttgtccagcagccacgtcggccacccgtccaccagctcatcctcccgccgcggcgccggctgcggagccggtgccggagtttcctcctcatccacggccgccgccgccgccgtcgcctccgcctccgccaccgccgccgcggagctttcatccatggcttgatgatgatcagtctgacgatcgttgccgccgtcccgctgatcggtctgcagctccctttcgacggcggcggtggcggcgcgacggccgctgccgcgggcggcgtcctgctgctgcccctgcggccgcagcagcagcctggcggcggccggcgcggcggcggggaggggatcggagaggcgggaggaggcgaccgggacgtagcggttcttgcgcatgaggtggtcgatgccacggccgtcgctgcgtgccggggagccctgcgagggcttgccctgcgcgcagcccatgtcgtcgtcgatggcgccggcgccggagcggtggcgccggcgtcggcggcggtggtgggggaagaagaggtggaggtggaagagggaggaggagcgcgacgaggagtgagacatcaacgaaagagaaggggggggcgaggggggcgaggtggcgccaaacatatacgttgaaatgatatgaaattatgaatattataattatcggcggccggcgccggctggccggcgcgggcggccgagagagagacgccgagtgttacgtctctgcatgcgcgcaacagtgaaggggttggaggcttggagcatgtatgcctgacagctatatttgttgccgcgtccagggtgcatttgtttttcgaaaaagaaaacatatacttcctacgttcatgtgcaatgctaaaaagtcttataacctgaaacagaggtagtgcgtgctacaagttgttttgatttttttaagttataaatttctttagatttgatcaagttttataaaaatataagcgatattttttaataaaaaaaagaaattttcaaaatatgtttaatgttagatgtagttaaactaatttgatgttgcaagtgttgctatatttttcataatttgattgaacttttaaaagtttgatttaaaaaataagtcagaacgatttatcaaatgaatcggatggagtagaatataggactccataacatagttctacttgaaaaatatgtacagtaggttatatacataacccctaattgcgcatgtaatccgcaacatagttctacgagaaaaatatgtacagtaggttatatatgcacaaccactaattgcgcatgtaaaaagttctacgaaagggtctgcacgaaacttaattgactgccaagatgtgatgtacttcctccgattcatattgtaagacttttaaatgaatatgggtaatgctagaaagtcttacgttgtgaaacggaggaagtacgtatattccctctgtctagaaatactgtcattaattatgtatcttttaagtaccaattaagagaaaaaaattgtattgttccttttaaatgatgtataggtcttgtttagttcccagaatttttttccccaaaaacatcatatcgaatctttgaacacatacattgaatattaaatatagataaaatgaaaaactaattgcatagtttgtatgaaaatcgcgagacaaaacttttaagcctaattagtccatgattagccataagtgctacaataacccacatgtgctaatgacggattaattaggcttaataaattcgtctcgcggtttccagacgagttatgaaattagttttttcattcgtgtccgaaaaccccttccgacatctgatcaaacgtttgatgtgacacctaaaaatttttcttttcgcaaactaaacaaggccatagttgcaagaaaaagggtagttagggtagaatggggagaaatttgaataggatttgatttatttgacaagtactattttaaagtaataattattatgggatagatttcaaaaatgattctcctcgggcgcccaacctgcaatgaaaaaaatcgagcactccctcgtccattctctcatgtgttaaccctaattaaaactaaggccttgtttgcatcccaaaaaattttggccaaaaacgtcacatcaaatattttgatacatgcatggggcattaaatgtgggaaaaaacaattgcacagtttgcaagtaaattgtgagacgaatcttttgagcctaattacgccatgatttgacaatatgatgctatagtaaacatttgctaatgacggattaattaggcttaataaattcatctcgcaatttacatatggaatctataatttgttttgttattagtctacgtttaatactttaagtgtgtgtccgtatactttaaaaactttacacccaaagaactaaacataccataagaagaatcgagtgttctagatggtctgctctctttttctctatactatatacaatagcgcgcgctctctctctctcatattgtatgcagtacaatgtgtactcacttttctctctcttataggtttaaaactatatcagtagcatctaaaataaattttctactaaactatttaatggatctgcaattcgattataccattgaaattttttaattaaatctttaaaataagatctcacatgattataatttagagaaaaaaatatatgtttcaaccattaaaatttgatgtttcacgtgtaattagcaaatgtttcaactggattttaactatgttgcatcgtttaagtttttcatttgcaatgtgtctgtttttaatgttgcacattgtgtaacttgaatgtctcagtaagtatattataacgtttcactagctcattagtaaatgttgcacgttgttcttcatatgttgcagaaagcattacgtgatgtttcaatataagtataactcaatgtttcagataagtttgtttcaattaaaaaatataatcatgtgtgatcttataaagatttgcaatgaatacaatatttgaatgaatactctcccttctctctttctcccaatctcttttgcaaaccgcagaggtaaacaacacattcactccttctgctccacagaggtgaactagatccggaagtgtcccggcgggcagagacagataccttggtggtcgtttacgtgtgggagtggaataagggcgacagtgacgggcgtagctccttgcttgaggactcgactagcatggtgggggagggggatgccagggatggggacaacaagcatgagcttctgcattgccgtggggctaggacgagcggcatgagctgagagaaattggtgccgatgagtgccaccatggcagtggcgagggagatcgagagcgaggccgatgcactgactgcctcatgacagtggaagctatggtgaagattgggagaaagagagaaaacagatggaagagttgataggtaaggacaacggtaattttgacctttcacaccgtttcaaacgtagatcaataatattttcaatggacgtgatgtccagcagggattatccataatttaaaagtgtctgccctaaatattgattttttccatgtttggaagctaaattcaaaaagtcgcgaagttataaattaaactcttggtaggacggagtagtcctggtgagaactggtttggggtatgagataaaaattaaagggggtgtgttaagtagtctagcgagatagtttaagtgagtaactaaaaaggtctttctctaccaactattgttaatgaagtgtttgtccagctgagggcacaggtcaaacagtagtaggctccttgtggtcaaatcattcactaaggccatttggcgtctagaagggttgggctagacgccagctactcaacgcctcgatcaacggtattctcaaagctgacgacgaggtcagaattaagatagaaacagcactacctgctaatcaaacgcagggtaagcaaaaatttatgtggagtaccgtacaaaaatcaggaaacaaattaaaaggaaagaaaggttcttgatgccttgccctacaactggagttatcaaagagaatcagctgtcaacgtctttaatttgatgcgtatagacatgtagaaatggacgccataggcggagtaatacaaatgtctactacagatcgcctatattcatatcatcgccggccgttgataatactattcatatcattactggccactgatgctaccgtgctacgagcgcattactagactatttcctcagttaaaaaaaaatttaaaatcctaactatgaatctaaatatatttagtcaggatttaatatttttttttggatggaggaagttcagatcttttcctagatggtagctctttaacgaatagacaattagccaatctttttttctcaatctctacatcatagatgatagatgtgtgtaaagtggatatacaatcctactatggttaaaaaaaaacaatgttatctacaatcgtattccctccatccataaaagttacacctatttcacatttaagtttttccaaataagttgttcctatttgtagtctttatgcattcaaaacttaaatgaaaagataaattaaatgttttattagaatccaaggagtcatctaaatactcattggttacatgcttacatttactccttgatttaatttttccttagtctttgtgtcaaaagtaatatacgtaacttttgttgatggagggagtatcttctaccactttaaaagcggtcgcagtttccctccacctctaccatcataattccctacgtaaaaaacatcctctaacagaaccgcaacacccaaaactagtgttttgatgcaaaaatcaactgaaaaacaggatagagaacaactaaacccatcactaaaatagagatatagaaaaattaaactgtataattctaatccctttgacactatgtctactagtataaaagcagagtcacccttcttctatctgctcctcccaccaccttaacacgttcgtgcactcctcttccctaaccatctgattcaaatgttactcaatcatcctttgacctcaacctattttttcgtaatcaccgggatctaatgtttctcgatcactgtcaacccctaattatatgggcatggcagcagggtgatgaaataagtgactgtcaactgtcaggtgcgcttggcgctcagtttaattcagctgtccacgtcgtcgttgccccaagaaaaagtgcaccgaaggtcccttaacttgtcagcaacctcaacttatcaacgagatacaaaaacatcctcgaaccgtaaaaccagatatgcaagatcccttaactatacaaaactgatcacaacagatcctttagtggttttcaacccggttttatcctacgtggcgctgagtcagcgtgggacccacgtgggacccacatgtcagccctctatctcttccccttcctctcccttcctctctcgacttggtgcggcgccgacggtggaccagggcgaggcgacggccacgcagtaggccctgaccgagaaggaccgagtgccgcggtgtcgagcaggctggggagaaaaacggcggaggccgagggaaagtgggaggtgcgcggcggctgcctctttccacggcgtggaggatgttcacaagctccggcatgaacccggcgtcgcccatggccttcttgatgtcctccgagacgtggcacagccggtgcgccgccttcagggcgcagtgctgcagcgtgacgtcaccgttgcggaggaagacgaggacgcggtcgaggaagccggcggcgacgagccgggatgtcgaggctagcgaggacgccgacgccgtcggcgcttcgctccgccgaccggtcgctcgctgcagcgctcacccgctgcgcatacgtgcccactgccgctccgctccactgcgcgcctgacactcaccgacgccccgacccctctgtcctcggcgagctcgtgtacagcgtccccggcgccaagaacgtcgagatgccccttctcgcagctcaggcacgtacatgaactctcatgcatgcaattatccatttaatcattgtgtttcttgctcataatcatctacgagttcttgttaatggcgatggatcacttgactaagttcaagtgcggcgggttcgtgctgggtctcgccatcaaccactgcatgttcgacggcgtcggcgccatacagttcgtcaactcgtgcgaggggtgtgccgctctccgcaggtcgctttcccgcaccacgagttcgcgcagatcgacggcggcgataacggcggctcgccgacgcaggacggcgccgagccgctcctgcacaggtcgttctggttcacgcccgagtccattgcccgcgtcaaggcgctcgtcgcggtcgacggcggcggcggcgggcgcgcgcccacgacgttcgaggcgctgggcatggggcacgcgcggcagagcaagctcctcttcgccgtgggcgggtgcccgtggttcacttcgcctcctccggcaaggagacgccgggcccagctccacgagcgtgggcgccgctctccgcgtccgagcccggtggggacctggtggtggttaggccggtgtgcgcgacggtgctgacgcgtaagaagtgcggcccgctggaggacatggcggcgcggcgatgggattcgtaccggtaggcaccgctgccgccgccctccccttatcccttgtcgccgccgccgcgtggccggtcagcgattgtgggacctcctctcccgcctcaccccggcgacctccccagtccccacccgctggccggccttccgagaggagaaaagtgagagagagagagaggaagggagaggaaagagagagaggtgatgacatggcttactgacatgtggggcccacgtgagtcccacgctgactcaaccgccatgtaggacaaaatcgggtcaaaaaccaccgaaggacctaaagtgaacggttttgtaagttgagggatgttatatatctggttttgtgggtcggagacgatttcgaactcaatgacaagttgaaggaccttgggtgtactttttccttggccccaatatatccatcttggcccggcccaaattcgtccatcacttcccatccggcccattaaaagaggcccaaattctaccagcttatctaatgggcctcactgaagcactccatttcggcccagactctctccgacgtctcggtgggctacctcgccgccggcgacaccctctgcccaatcgcgccgccgccgccgccaccatcgccccgctgaccgcctcctcccgcggctgtccgagcggcgcggcgccttcgtcttcccctgctccggcccgcctcttctctggtgagcgagcgcctgcgattccttccccacctctctctcactcgagtccctccgacgagcccggatgcaggaatggcccgccgtctcctcctcctccaccacctccgccgccgctactccgtctccgtctcctccgccgaggacatggtcgtctcctccctccgcatcctctcctcagctagccctagcgaaccaaccactctccctcctcctaccattcatcccgatccggatgcaacggcgacgagccctactactgctgctgctgctgctctcctatcccccgccgaccgcctccgcggggtcttcctcctcaagccccccggccgcgccgccctccaccgtgctctctcatccacgggcatcgacgccgccgctgccctctcaccggaggtgctttccggcgttgtcagccacggcaacttcagtggcgccgccactgtcgacttctttgactgggccatcgcaaacagcaagctcccgccatccgtcgatacctgcaatattgtcatcagggctttgggcaggaggaaattcttcgccttcttcgaacccgccctggagatcatgcgtaaaaacggcgtgtctcctgacataagcacgctggagatcatcatcgatagtctgattgctgctcggcatgtcaacacagccatccaactgatcaacactgaccattttggacttggagtttggcaaacttgccagagaaaggagatctttactgtcctcatcaactgcctctgtcggaggtcgcatgtcggtctcgccagctcgctcttgcaggcttctcgtggagagacgattgatcttgataaccatatgtataatgaggttattggtggttgggcgaggtttgggagggttgataaagtggaacatttctgggaaacgatgctggaagatgggcttgtacccgatcaggtttcatattgccatctcatcgaggcattgggtagagcaaaccgggctgaggaagcactacaggtgtttgagaagatggtacatgagggatattgtccaaccacgatggcttacaatgcacttatttttaattttatatcggtgggaaattttgacagatgtatcaagtattacaaagatatgttagacaacaattgtcctccaaatattgacacatacagaaaaatgataagagcctttttgagggagcgcaaagtggctgatgcacttcaaatgtttgatgaaatgttgagtcgaggaattctgccaagtactgggatgattacgttattcattgaaccactctgcacatttgggccccctcatgctgccttgctgatctacaaaaggagtaggaaggctggttgtagaatatccatgaaagcttataaacttttgcttgaaaggctcgctatgttcgggaagagtggaacagttctacagatttgggaggagatgcaagaatctgggcatccatctgataaggagatttatgagtttattgtgaatgggctctgtaatgttggtaaggttgatgctgctgtttctgtggtggaggaatcaattcggaaaggcttctgtcttggtagagttgtttatggcaaactgaacaacaaattgttggagatgaacaaagttgagactgcatacaatttgttcaagaaggtcagagatgcacgtgtaattgctaattcacgtaactattggcgtgctaacggttggcacttctgacttcacccattttctcattctgatggtaaaaagtaagctatttgttgttactagtgaaatctgattggttttatattggagatatatagcgttttttttttaaaaaaaaatgcatggagctaaaactcaaaatgggtgatgaaatactgagtgacagggaactcttgttggcctgttacatcattcaaaggtcaattgagctaaaagaagaaatgcagcaaatagggtgacctagtgagtaggaattgacgacagatactattgccctttgctctgctgttaaaattgaatgttttcatgttcagaaggtttgaacactgctactaccactctaccagcaaaaagcagctcacggatcatgctggaaagtggaaatatagtcccattgagaaaactttcaagatcattctcagtttgctctttcagtgggaattcatgaatccatctttttcagaggaatgtcctcttcatgctcatgcaggcacaattattttattctccaataaatatttcatctttctcggtacgtgtttttaccaacataaagttttgatagcctgatctaacatgtaacataaaagtggtattgcatagtggttttgttgcactggagaagatattgggtccaattctagtgtttagttacctaagcattggataagtactggagtttatcatgacagattgtttttcaatttagttatcgaaaatgcagctttgacattcttttattagtatacatttgagatagaatatgttcataataactttttgataaccacttttattttttctccttgcagccacttaaaatattatcaaaatatttttatcataggtcagaaaggttgactgcgcaactttttgcagttgctaattctgtccagagatcaggagtaaattatttaccagaatgtcatggaggtgtggggtttccaaacctgtcattgttcaatctggcatcatttgggaaacaagattggcagatattttacaaattctaatgctctttgtgtgcagggatgttgaactagaaagaaaggtttcttctcaattaccagtggcgagttattagcagcaaggtgcttgagcaagagactgagagagctaactagaacagtttatagaagctccacaaatttttatttcggtccctgagtatctcaatatcagtgtttcaacacccactgatgaggctctggtaccaagagattgatctgatcactgatagcagtgtttggaatgacacatacgacaatgttcttttctcctaatattgatacaatcttgattgcaaaattcaggacttgtcggcctgggctcatgggagacatcaggttaatcaacattcagtgagatccacatacagtttgctcattacggactggagttgtgctgaactggaagcagactccaaaggtgaggttttctgttggagagaagatttggcttcttgcctacttgttatgttgttcaagtactcgaggtgcattgatcgtctcacacatgtaatctgtggtgctgaggtcgaacctatcacgcgtgttcctgttgagtgcatagtagccaaggatttctgggtacttttttttccaaagaaatgattgttactccctctgtttcaagttataagactttctagcattgtccacattcatatagattttaatgaatctaggcacacacatatgtctaagatttattaacatatatatgaatgtggacaatgctagaaagtcttataatatggaacggaacggaggaagtatcattttcaaacttggaggtgtacgtgttaccattttcatttgtggtgtgcgttcattatggatatccaggaataggcgttggcatggagacaagctgtgatatgggctctgagtacagcttttggtctatggcaaataccctaccaaacaatccgggactgattagaagcttgcgttgatttgaaacacatataaccagggcagagatatctctgatcgtcaagaaacccaaagagagcatagcaggaatttcttctaatcatttgtttcatgtttttttttctcatgatgtcgcaacagtgttgagcacgtacggtgctaagggtatgaatagtggtgtaatatcaattgtcaggaaggaagatttgatcctttatgatttgggtagcattatatcgttcatgtcattgtatagactgcttatagaagtataatgttaatcatatgaatcctctgtagataattatatgttaatagaaaatctatcatacgaattatatatattatatctaaaaatgaggtgaaaagtttatccaaatagctgatgtcgaaattgtgccctaagcagaatgtttgtagtagaggaagatgcacgtggcttttttatcacctttcttgcaaatatgcctgcaaatcgattgtaatcctgctcaaagctactaaaaataggaattccataattctaaaaataaaaagtaagaaattacacgattcatatcttgaagatcgcaagtaaagaacccataacaaaattacacgactgaacggtgcaaagaagcatgacaccaagatttcctagaagcattacacccataacaaattcatatctaagtgtcatgcttcttttggcaaccaagatttcaaacctcacaggtgaagtcatacaagcttgtccagtccatatctactagcctactcccaggagtatttaaggctgtgttcggtactctgttttcccaactctcctctctcgttttccgcgtacacgtttttcaaactgctaaacagtgtgttttttaaaaaaagtttctatacgaaagttgcttaaaaaaatcatattgattcatttttgaaaaaaaatagctaatacttaattaatcacatgctaatggaccactccgttttccgtgcacgggagatgggttcccaactcccacctccgaacacagcctcgtgcgcgatcataatatcccttcaggaaacatgttaaatgttatttatagtaattagctaaaataagtgtccgtataacatactttgtaaagaagcgtagttataacaataacatatatattctacgtcgtaatgcggcctgttcaccgttcgcgtgtccgattataaattatgtattccattcgtccacaaatataattagtcctaggttgttgtttagtagagttcaagattgaggtgaaaatacttagataccccggagaatttactcgtttggagatcccccgtataatttggaaaatttgaagacggacagagtagatgagaatttccattttccaaacgacaactatgaatagagatgtgtatttaaaatttattggtgcccaattacttcctattgagaaagtataatatttttattattcgcacttgatgtgagatctggggttgtagtgattggcattgcaatgtttaatatgccctttttcacatgggatcaaccggttctattttatgtttttaaagaagagcatataaaaaaatctcatatgcacttataaacatattaaaaaccaaatcttatatatatttatggacctatctaacagtcaactaactcaatcaacaactataggcccaagctccctggctcggtgcagggatgcgagacatggacgatgctgtagcttgtagttctttttttttttcttttatttctttgctctctaatctctactatttttatctctttgccacgatgagggagtgttggaaaaatccataataccctcaatagctgagatttattttatctatttgatcattttatgattctaacagataatattaatcagatgatgtgacttatcctggttgtattctcagattcattcttcactagtactccctctgtcccccagaaaaaaaaaaggatcctagtacaataaatctggacgttaggagaggtcacatcccctcctaggttaccttttttttttttgaacggagagagtagagattagaaatgatactttgggatggatgtaaatccaagcaaattgcttcatctggaactctaccaaacaaaataaaggtaatgtggctattgcaggaaaattgacgccagatagaacagataatgtaacctcatgaatataccaaacatggaattcaattttgaaatgtttatagtaagaatcaaattgggggtaatgttcattgtattgttaagcacataatgaaatcatatggaataacacaatcaatacagtaacgctagtcgatagcctagcaatctgaattggatttcgaacataaatgttcagaactgcttccatgacaagtaagaggccagccacatcggttcatcatcaatgtcgaaaggatcaggaaccagcctccggttggatgaactgcttcaggatttggaagatgctttacttcatcattcatccagaaatgtgtggacaaaaggcccactcgagattccagtgcacggagctgctctttttttcttctgctagtcatcaaaaagggtagagacaagcaggtgctgtacaaaagatgatctcactgcagctcgcctccgccttctctccctttcttcctgactaagattagaatcagagctgcaagaaagatagtcgattaacatacgctcttgttcatagagcatgacgagctcaatgtcagtgtgtataaaccaaataataacttggtcccacctagatagatggtcagatttattagtgggaatttcctcagattgccatattagtatagttatagataaaccaactttagtgtggatcaatagagctcacaagtttatagtgacttataagctgagtttacttacacaatttatagcatacaaatgaactttaggatgtacaaacagtaacacaattggtaggaatgaaatctaggccaagcagatctacaattttgagtatcggaaagcatatctgaactggtaaattgaggattatttgttcacaaagttataataattttatctgggattaagacctagaaaaccatacaaggcacaaaaatagtactagtagcacacaggaaggtattgatcataccttgccttccaagtctttgaaggcagtgttcttttaaaccaattattttctaccacagctagagcagaaaatttcgctgtatcttcggcttcggatgaagataaatttaaaacaagtgaagatagtagtgaatcagtgactgaacttgctgcattggtaccactgcttcgactactgtttccaagaagaacctttaagtaggtctcctgtagatctctccctccaagggagagagcatggttgctaggaacagcaactctgcgtaatctgtgatgtctctgcaggtaatacaccattaaggaaacatatgaaaataacagttcacaaaacatgatacagaatttagagacttttaacatctcaaaaaggatattctaaacaggtagctgtgctgaagggttatgtgatccaataagtcctttgaaatcctagccgagcaaaccgggcaagcctgtggagagtatacaagtatggttagggagtaggaactacagaatatatcatatggaaggagtattaggtccacctcgttattgtaccaaaagctggctgacttttttaatttataagccctgaatctggtttttggcttaatcctatataagaactgtgtaaatatcttgcttgtgtgcatcatgatgttgttttcactattgaaatgaacatattcggtactaaatcacgttactgacaaatgttcatgtcttcagaaaattgatagcaccaaacttgactatagttcgatacttcgatgcaccttcagaaggagcttgattttttataccagcagtttccacagtttccagtataaccgtgttcccagttagtccagcgcagtatgccaatcccaaaccaacccttagtccccttagtatagtatccttatggcaaaaggaacaattgagttctaattgtctggtctggctagaaaagaagatctatgccttaattgtatgttctgtctttaaaatgaatatctaggcattagtgttttctttgtcctagatcaaatactgtctgttaaattaatcattttagagagagattaaactatgcaaataacatattggtacctgggtattgcaagcccagcctttaaacattcatagagaaacctctcaacatttaaatggatcatttaaagagatgacattggataagaattaaaacaaatcattcctgcagcatacaactataaattaagtaacaaattatacagcatatgcaacacaacaaattaaggcaatcatatcagaacggtccaatacacatcaaagttaaactttaacctaaaggttcatgtagccaatgtgtaacaactgcaaaatatgagtatttccatttagcttcttctcacaatctctctccatcatttatgtattaattcaatatctccatgtagtaacaaaacactgattattcacaacgaaatttagtaacctactcgagttctacaaggttaatctatggctatccaaaatgaaagaaacaaaaggagtggatatgatttctcacacatttgactgacttcagataaaagaagcatataagaaaatacagaaagagagtagaaagcagagatacttaccacaactttagactcaaaggggtgctcatcctctaaatgggcacaaagagatgtaatgtcatgatcttcatagcagtaaggacatgggaagtctggccgtacctcgtcctctggctcaacatcatcgtacccataccgatctgcaagtgaattaatttaagacatgcaaaagttagatagtataaaatgaatgttaatttcaatcaggtctccataaggcaaacaaatagaacatcaagaaccagaagaaagcaaaccaatctcaaataattgcaaatatccgaagaaagaaataacgcaatattgtcaaaccaaatccgaaagcgtcatttcgcgacttacatttgaacagggaaaacgtagcatttcaaaaacggaaaatcaatatgaacgcactgagtattcaaaagattatcacgtttggcataggtgcatttcatcaaaggtcaaatctttcagacgagtcaaataggcccccatcaaaagttcaaaaccaagaaatggagccaaatgagacgaaacaacgatgcatgctcaatcctcctcttattggtcctcaccgaaacaacatgaatccaaacacaaatcaatcgaattcctagaaatcaacccatcacaaaccgagcctcaaaagactcaaactagcgacgacgaatcgagagatccggaaaggggacatccatcctccgcggccagaccaaaatcttccgctcagggaaacaaaaaatcgcggcttggctttctacgccggatcaagaaaggggaagaaatcaaggcaaggtataccgaggtgggagtgcgacgcggcggtggcggtggcggtggcggtggcgtggtggtgattctgggcgcgctgcagcgcgtactggcgcttggcggccatgaggcgggagatccagtggtcggaatccatggcgccgcgggctcctcctcctccgcgggtcgccgcccggatctccgcgtatcgtctcgtctccttcctctcgtctcgtctcgtcgcctccccctctacacggcaccaccaaccaaaataataaaacaaaatcaatggccgctgttattttttctcttccatttttaaaaaagatattttttttgtttgtttggttgatacaggggagttagtcgttgggaatggcagttgagatagtacactgtacatgcctacgtatagccagcaagacagggtctttctcttttgtctgctttgcacgttttctttatcttttttcctttttttctatgtttttactcgtattttatttttattaaaaataaaataaagtatattatatactacatattaagggttttagtacgtaagcaataagttgtaaagtagttatcggattggctactctcttatttattgtgagcactgtcgacatttgatgtcgcgattccgttatttgcataggatagggatcgttggtactaggatatatgcgagattgaggtaaaagagacagagacaaggatttttatacaggttcgggcccctgaattgtcaagtaatagccctacatcctgttggccgaagccggtcattgctcttattcatcataatcacaccggtacaatatttggggtagcctatctaactattgtcgacatagcggtctgaagttctgacttatagtcgacaatagggtagccttcctcctcgaatccgcatccggcgagatcagagacagcgctatatctctcctgacggtatctgtaggcaccgtaggggactagccatgcctatctctgaagtcgatgtccggcatcttgtcttggcgtatgttggcttgtatgttgttccatgtatgttgattgtgtcccctctcctcctagggggccttgtatttatacccataggtgtccccttgtccaagtagaactagggaaaccaatatggatacaatccgagtagtccttgtcgtttccatgtagaactctagttgtctttctttatccggaactacctccatatccgaagtcagtttccgtataagacatggtatgtggtgggtcctgccgagatttagtcaactactattaggtgtgtggtatccataaccctgacagtagccccccgacttcaatgcaaatgaacaaattcatattctcaaccgcagaccttggagtaactgttatcgagctcacgtgaccgttctcagtaagttcaaagataactttagacttcccttatcagcctcgtgcgggtacctatagggtttgtctgagtcaatctccgacgtcaaccaagaaagtacagaaagtacagagcatacgactaagtctcccgtcttactgtaatcgagaatttggattgaagtcaagaaattttatctcggtgagtacaccatcttttcattttgtattccttgtcgagatccaccaaccgttctcgaatggtcaagaaggcgcagagtctgcgacgaagccttgtcaacatttatcatactcgccttagtcgatcttggtgtagaaccatagagacatggagtcttcaatgatgtcgaatagaattttcctgaaatcaatactcagaaaagaatattagatggaaatagcccctgagcgaacgctcaaagggtgacatgttataatatgtatggaaaactgaaaataaattaaatttacagaccaatgttttgtgtacgagcgtcttctcttttaccgatttcggtcagtcagtttgttgagtcatacactctccctagcccctagccttgtcgtcggagaattgttctcggaggataaggctcttggacccttgacctgccttggttgaaaaagcactgaccctagcccccagccgtgaagttggaaaactaaatttccgattgcacggcttggttaatacgcacggtaagaactcttacatgaccagatcttacatggtcgtttgtctctgcatgatctgacaaggccttatccgctctgggtgtccctagccgaagttcccttaggttcctcggaggccttgccaggacagcgtaaagggacagtaggattggtttcaactctaggtgtcgtcgtggtaagggatctctggataaaacacttggtgatattgtgtacctgatatcaactttgttggagtagaggtaataggaggatcgctacaccgctggtcgaaaaccagttgtagccccaactcgaccacttaaagtaaaggtagtgggagaatggctacaccactggtcgaggaccaggtagtagtcgtaactcgactacttaaagtggaaatggtgggagaatcgctacaccgctggtcgaggaccaggtagtagtcgtaactcgaccactagaagtggaaatagtgggagaatcgctacaccgctggtcgaggaccaggtagtagtcgtaactcgaccactagaagtaaggcgagagagatcactacgttttactggtttgagaaccaggagtaggagtctcttaatcacctataggggcgctaaagttgatttattacatgtgcatctcatgtggccagcatgactcacatacccaacttatagcatatctggatgtccgttcgcaatcatatcgggtgatcaagccgacgacgttcacgaggaattatccgttaacagccttttctcgagtagtccagccatggccggtgctatgagatagatcgtcggtctccgttggcaggttgggcgcgatgactttgcatttgtcaagatcgttctcgataatggggtatactcgaccacaacctactcgagtgctcaattgttcctgaaaaatattttctagaaggcaagacatatagcagagaatatcgagtatgcactcaaaaaactgcatggatcttctagcattatcaggatataacgagcagattaaatatcaagcattatgtaaaccgtaaacaagcatgatttatacagaggaatacagagcgagcccccagcattaaaccgtagttggtttaatatagggaatattcgcacaaaagatattgtataaaaaaaacatgctctaggtaaacataataaattatagatctgacaatgttgtatgatctgataaattgcagataaaatattgcgtacctttgtagatacatgccggatgtatctacgaaattagtagattaatttaaaaaaccaatctaccaattaccttgttgcgtactcgttcgacatcatacgatctgacatcttttggtacgccgcgaagcttgaggcttggatgatctcgatagaccaagttgtcgatgacgatgatggttccgatctggttaggttggatctccccctcagctgaagtcgtcgagtagctcgttgtcggagaatccatctcttaaacccatctcgtcgaaaccttgaagcaccaaaagaccccctacctggcgcgccactgtcgacgtttgatatcgcgattccggtatttgcatagtatggggatcgttggtactaggatatatgcgagattgaggtaaaagagacagagacgaggatttttatacaggttcgggcccctgaattatcaggtattagccctacatcctgttggccgaagccggtcgttactcttattcatcataatcacaccagtacaatatttggggtagcctatctaactattatcgacatagcggtctgaagttctgactcgtagtcgacaacagggtagccttcctcctcgaatccgtatccggcgagatcagagacaacgctatatctctcctgacggtatccgtaggcaccgtaggagactagccatgcctatctctgaagtcgatgtccggcgtcttgtcttggtgtatgttggcttgtatgttgttccatgtatgttgattgtgtcccctctcctcctagggggccttgtatttatacccataggtgtccccttgtccaagtagaattagggaaaccaatatggatacaatccgagtagtccttgtcgtttccatgtagaactctagttgtctttccttatccggaactcccttcatatccgaagtcaattctcgtataaacatggtatgtggtgggtcctgccgagatttagtcaactacgattaggtatgtggtatccataaccctgacaagcacgtttcctcaattgatctaggaatttttataaaagaaattaataccttttgataataatatctaagttcgtctaaaccattatattccttataattaaattgataatcatgaccttcatttgatatatttaagtgcagtgtgcgtattattagaaatatattctagataaaagataaatctatttttggctttataatatttaattaatcttgcactaatgactcgtttcgtgtgtccaagataagctcagctattgagctagattaaagcctaagtcggagatagaagctacacttcgacacggtgtcaaaacaatatataagatctttaattttcaaatattatacgaatagagaaaacacataatacctgaaaatacgttcatgataatttagtaatatcattttgacatattattgtcttttacctaggaaatggaaaatttttagaattgttagtcacaattagagttgtttttattttatttatatttttatggatgtttgaatgaaatgcgcctaattagaaactctatataacatatattttgcatagtaaatataggcagtttgattttctatctaataagtgagaaagaaaaagaaaaaaagaatgatgtgggtccagtgtcgtacgtacgtatcaaagtatggacgtactttcttttttttttgaaatacctatacgtgcacgtacaatgctagtttttagataaatttaattgtattttttataataaatctaatggtcagaaataatgggtccaccggattttaaaatttattagagtgacacgtgacgactcgagagcgtttataggatgccacatggcagccttggagcgcctgtagcaagtttaatggacttttagtatataatatatagatgtcaccatatttataggattttttttaattttttttcataatttctcgatttaaatttacatttttcatattttataatttttttcacaattttttacttacatccttcgaaattcccggtgggattagttcccggccctgttgatttcacggtttttgggaaaaaccggtcggtttccatgggggaaagcaaacccttgttagccaagatcataagttcatacttcataaccaagtagccaacacatcgtccatcggcacgcgacggcagggattagttttcactcttcctgtgcttcgatcgcagaagcagcaagggtggtggtggcggcggcctcgttttgcctgcaaaaaaagcagagagggaaagccaggggcccagggctcacctgatcgatatatatatatatatatatatatatatatatatatatatatatatatatatatatatatatatatatatatatatatatatacacgctctaatctcaccatatgtcactctagggaattatagaaaataacaaaacatctagccgtcgattttcactaatatacggtggacccatattttctatcatcggatttacttaaagaaaaaaaaggcccacaccccaccgctgccattatatatcgtaggtatatgtacgtataattacttatgtacgtatcatatatcgtccctgctctcaccctaatacatgaggacgatgcccacctattttcaagcatttttcttaattaatattggaaaacatattttgtattaaattattttaaacaaatataccatctaaatagatattttttaatctgtgcacggcatgagattatttgcaataaaatttagaattcaatacccaaattaaatgcattttaaaagtaaaataaatgtatttcctagagactacatattggttcactcgatacatttttagaaaaatcacatagatttttaaactatatgattagcaacatttagcttatattagtaaatacaatacccgacatattttctaatagatctaaaattatatctatcttttaaaaatagataactaaagactagaacccgttggaatatgtcttaggaaaaaaaatctccgcccctcatcctcaacctgctgtacatatatctcctctgatcctctcccgttctattttttaactaacaacctaatattaaaaaacaaagctaaatggtttataatttctaaatttatatttgatttttaatttgtttgaactattgttttatttacaagtaattacataattcaatatccatcatatttgttttttactatataaaaattaaaatattcctttgcgggaaactaaatgacaatgaaaaactataacaaaataacaacatgtattatttcatattaaatcggtctacgtaataaaaaccaattaaacaccctttagagcacacttaaatcaccatatgtcacattttaaaattataaatatttcaattaaatcaatgtcctgaaaatcagaaataatcttagaaattttgagaaaaaaattaaacctatcatcattggttttaatggttttaagttacattatttggagaaattagaaaaataaatcgcatctacctccttgtccccctcacatgcgcgcagaccacttcctatcccattcctttttttgcgtaggagtaaactaaaagagaaataattaatatattaaattaaccataatttttaagctgcacgtctgatttctaaaaaaaatgttgctctgattataactaaactaggaatttaagatcgctatccttatatttttcctatatacaaaatatgacattcgaccacatccagcccacgaccctatgcgctttgcataccatctaaatatgattgaaataccttaaacaaattggctgcatatattacatcactatacatcattctgcaaacatgtatagctaaattaaatcaatagtatccaaacaaaaattacaaagtgaattataaaacatttttttattgaggaagaacacccctacccttttacatgtcatttgaattgctgtaaaagaattacgaaataatccaatacaggttgcatcatcatatgttgtttctcgaacatgcataggtaaattagatatgcactatctaagcaaatatgactaactaaaatatgaaatccaaaccaccaatacatagaaaatccaatggctttagtttgagaaaaaaaatccaattacttcgtgaacttttgtaaaatgtgctaaaataatccaagcatgctaaatgatctttcgtgtatctgctctaaactatgttaccatctaattgactttagatgatgcttaatgcacttttagtatctcattgatgtatgttcaagcgtgctaatttgttctggccttctaagcattccgagtaactcagtttattttctttgtgcatagaccatttaaaaggtgaatcatccctatatatgaacattaatcatttgcgaatatatttttgttgatatatatacttgaatgattaactttggagattttacgatataacaagacatggaaataggactaactaagtttgaccaaaaatgtgatcaccactatgatgaatcacaaggcaacctccataggtgcaatgaccacatctcaacacggtgactaggaactgcgagctgcatgaaaactgtttggcggggaaaaaggaacagtgaatttagcaattcactaggtcttacgttttcaccagcagggcccaaagcattcaaaaaacaaagaaaaaaaaacaccttgcttttaatttaataatcatgttttcttaacatactaggtgtagctccgatgatgatgaagattatagataattgcttatacatattaattaaatactatatagtatatagcgtagagaaattatcaaagtgatgccaacgaagaatatttgttgaggaaatgtacttccaaaacatggcagaggctatctgataaatatgatttgttttcaaatgtagcccacgatacatgtccgcgcgaatgcgcaggctaccttcctagtttcacataataaccacgaaaactttgacctttggaaacatagaactaccgcgttcaaaaactcgtattagaatttatggttaggttttcctatcatcttaatagagcattggccatcccgtttaagttcaaatataccaccgctctatttggatgatgaacgagcccctatagtcgattctcttgcgaattttccaaagttgttatcctctattattatgtatcaaagttgtagtagttccgtaaaattgccacaacaaattgcagccatttgtcattacatatattataccgatatatagtcgggaaaatatctaatgcaaaccacatataatatatagtgaaaacatggaaactacctttggatcgagaaataaacgttcgagattcgtccacgtcaccctgagttaaaatttaactcgcagattcactcatgagttgaaattttactaggagttaaattttaactcatggtgacgtggacgaatctcggacgtccatttctcgatccaacggtatccatgtttccactacatatgtggtttgcactacatattttcccgtggttttgcaaaaccaatctaaagaatatgctatgcagtcaaacattattacccagccagaagggtctcctgcactttaaccaagtttacaagagatggaggcctttctgagaggaaagcacctcctacatttggcagcaggcgaccagatatgaataagaaacagaagcaaaatactacacgatcagcaaaggctatatgacgacactgttacaagagctccagttcgtgccagaatatcatgtaaacaaaaagacaacattatgtcggcaccaggcaacaagagtgtttgcttcgaaccagcatccttccactgaatggaaaaaaaaagggggaacatttcaactggaacttccccatatcttttttaatcatggattttatttcgtcaacacttgagccctcacagcggcctccattcatcgcaacggaccatgcaaaaccgccaaaaatataatgcaggaggttcccaaaacgtttgttcgtgagccaatgctgcaagaagccaaaaaaaaaaggggtcaaggaaaggaagaggggaaagcaacataaatattcaagcctatcaatacattttttgtttcaataaacctttagtcctacaaaccttcactgcttctggccggatctgtgttcagtaattctggtggcgctgatacgtccaattttgacacccaggaatagcatatttccaagatcttggatcccgtagtttaggccctgaatatgggaaacggtttgattatttcactccgtacatcaactacaccgatgccaaaacaaattaccatagaaacttacaatggaatgtattacaccagtcataatgaattgttcatggaaaagaaaaatattcccatcttattgatggaaactgagaaatggtgattctttttcttttttgagatggataaaatggtgatgcactactactactactaccgtgtattttcacgtgtactgaaacactctgcaaggagagaaattgtgtgcaatccagattagagcaccgtcagcattagtttctaatgggccgctagtctgaaagtaaactccctatcaaccggtctgccataacagaaaggtcacatgggaataagaattactaaaagtgcatctcaaaacattgacaaaccaaatgaacaccgtgtagagagagagagagagagagagagagacgaggaaatggaatgataccttcaataggatcgcttgagtgagcatgtgacaagtcatggtaggtgcttataaagaggcttcatatttatggctgggcagtatttgacgagaaccctcctgagagcagagtaattcccaagattaccaggtaatgatgtcagacgtttgcaattcaaaagtccaaagtcttctaatgcaggtaggttcccccaatcaggcgagtccaacttattgcagcccccaatactcacgtccacgagttgatccaaattccctgatatggagcgaagctctggacagtgataaattgacaagttcttgagagatggaggcagatttcgaagcatggccaacttatcggaacccattatgaatagggtatctaggcaaggtaaatagttatttcctggcttctctgagacacttgtgggcgtgaggtcattgccatgctccacctgtaaattaatcggactctgtatcacctgtccccctcccccataagcactggaagttaggacaccctctaatacatatgtatgttatagatcgaggaaggacgaacagctatgttaagcttttgcaatgtcttatctctagttttgttagctgtggcaggagctgatcccttgcttgtgttgccgttccattcacttgtgcacggccaattatattagagcataaaacaatgatcaattccttcaaggatatcaagcttaggaactcttcctctggccagtggatgagagcatcgcaccgactaattttcaatttttgaagttgtccaaaccatttccaaatcccaaccacaggttgcaatggacttgaggtgaagagaaagcagcatcctgtaattttgattactgaaattgataattcatgattctgatcaagctccagtgttgtttcactgtctctaactgacaattttaaaacagacatgacgacatgtatctagtggatgtgattagggaaagggatagctgtgccatgtcttcgtttagcttgacaaccttgacctttggtggtccaggcagactcgtcaacttcggacagttcctaatatcaatctcctcaagcactggaaaggacagctcttcttttcctggtgttgccacccagctctcgaagctctctaaatcatgtaattggagtttctttaatgctggaaattccacatatgccattttgctgcacatgctctgtaatttatctacctttatcaagtgaagaatttgaagggccctcaaatgcgaaaattcagggaagtcggtacacaatgtacagccaacaagatggagctcagtcagatgttgctgaaacaaactaagttctttcatccatgttggtgcacctctgcctttatagttaacaattcttagcatctccagcccaccatgaggtttaagagcatctagcaccttcgcatgacaatcttgtactagttcctcaggacccccactattccactcaagagataaatgttagaatttcaatggttactctcattgagaagaggatggcactcgagatggggcaattttctggttttcttcattcactaaacacaaaagccatgtcctcccaaagaggattggatacatatttatagctgcttgtagcagccatgcagccatgctagtctaagagggtgctgtcagcatcccaacaaactgtcctagagcagagcatcccaacaaactgtcctagagcatctcaacaaactgctgtcctaactgtcctagagcatccaaactgaaagtagagatgctgtcctagaaagctgaaaagcaggaaaaaggcaccacaagaccaagaccaaccagccaagacttattcctacattctccccctaagtcttgtgcgccgtcttgtgggagagttgagccatcccgatccgggagcaaagctcaaggaacttgatcctcccaaggggtttggtgagcaaatccgcaagctggtccttggtgttgatgtagctcgccttgatgctcccttcctccaagtagcttcggatgaaatggtacctcactcggatgtgcttgctccgttcgtgaaaaacggggttttttgccagggccagagcggacttgctatccaccctgagctccaccgctccagtatctctgccgaggagatcactaagcagtcgagcaagccagagcgcctgggtcgaagcggcggatgctgccatgtactcggcctcgcagctggacagggccaccacctgctgcttgattgactgccagctaacgaggcactcgccgaggaaaaagagaatcccgctcgtgctcttgctggtgtcgatgtcgccggcgtggtcgctgtcgctgtacccgacgaagtgtgccttgccaggacacctcgggtagtagagaccgtggtcgagagtccccgcaacgtagcggatgatcctcttcacagcctgctggtgctccgtcgtcggtcgctgcatgaaccgactgacgtagccgacggagaaggccaagtccggccgtgtgtgggtgaggtagcgaaggctccccacaagacgtcggtactgtgtagcatccacctcctccgctgtgctgtcgcggctcagcttcagtctctcctccatcggagtgagagctgggttgcaatcggtgagcccagccagctcaacgacgcgcttggcgtaggcggtctgtcgaagcgtgatcccggagttgtcctggtgcacttcgatccccaggtagaaggagagaggccccagatcactcatctggaaggtggccttcatctcctccttgaacgccgcgacctctgcatccttggtgccggtgatcactaagtcgtcgacgtagacacccaccagcaaggcatttcctccattgccccgccggtagatggccgcctcgtgcgggctttgctcgaagcccatccccttgagcgtggaatccaacttggcattccacgccctcggtgcctgccgcaagccgtagagggccttgtgcaggcgtagcaccttgccctccttgccggggatcacaaatctcggcggctggtgcacgtagacctcctccttcaagtcgccgtttagaaacgccgacttgacgtccatgtgatggacgccccagccttcctgagcagccagcgcaagaaggagtcgcacggactccatccgtgccacgggagcgaaggcatcgtcgtagtcgatcccctcctgctgcacgaaaccgcgtgccaccaagcgagccttgtgcttgacgatggctccggcttcatccctcttcagcttgaacacccacttaagggtgatcgcgcggtgaccacgagggaggtcagcaagctcccaggtgcggttctcctgaaccgcgtccatctccgactgcatcgcggcacgccatgccgcgtgtttctcggcctctgcaaaagaccgaggctcaccgtcgtcgcacgcaaggtgcaactgcgcctccaggttgcgaggcaccagtcccggcaccggctggtcgccgagaagatcctccatcgtacggtaccgtagctgctcgccgtcatggtacgcgtcgatgcgctccccgtcgtgggagagcggagtaacgaactccaccgggctgcgctcaacacgagctggcgtcggagtagacgtgcccggaggagtggctgttggtgctggagcgtgtggggacaccggctggggtggtgtcgacgaagagctcgtcgtagtcgaagtcgtggcccgagggtgtgttggtgttggagtcggtggaggctcggggactggggtagacacgctcggtgaagaagagctgcctactcccccagctccctcgaagtggacgtactcgatggtgaagtcgtcgtacgtcggagtcgaaccatcatccaccgccttgtcccatacccaccctcgcccttcgtcgaacacaacatcgcgcgtaatgcgcacacgctgtgtctccgggtcgaggatgcggtaggccttcgagccctccgcgtagccgatgaacacccctggggtgctcctgtcgtcgagcttgccgatgtggccaagctccttggcgaacgcgaggcagccgaagacccgcaggtgggagaccgccggcttgcgcccatgccaagcctcgtacggtgtcctgccatcgagggccttggtaggcgagcggttgaggatgtaggcggccgtcaccaccgcctccccccagaagatggccggcatccccctctgcttgaggagggcccgagccatccccacaaccgtctggttgcgccgctcgacgacgccgttctgctgtgggctgtacggcgcggtgtagtggcgctgaatgccctcatcagcgcagtacgacgcgaattcagctgccgtgaattcgccgccgttgtcggtgcgcagcacgcgcagcttgcggccgcactccgcctctgcagcagcctgcgcatgcctgatggcgtccgcagcctctcccttgctgccgaggaccatcacccacatgtagcgggagaggtcgtcgacgagcagcaggaaataacgtcgtcctcctggtgtggccggtgtcactgggccacacaagtccccgtgcacgagcccgagccgctccttggctcggaagctcgtctgctggggaaaggggagccgccgctgctttgtcaccacgcagacgtcgcagagctgctccacgtggtcaaggcacggcatgcctcgcaccatctccttggcactgagctgcttcagggcctcgaagtggaggtgcccgaagcgctcgtgccactgccacgcctcgtcgtcccgacgagcggcgaggcaaactggatgtgcgacctgcgcgctgaggatgtagagtcgattagtgcctctggttaccttggcaagaaggcgacgacggcgatcccaaatcctcatgagtccgtcctcgaccaacacgcgtgagccgttctcatccagctgtcccacgctgatgatagaattcctcaacgcggggatgtagtagactccggtgagcagcctgtgctcaccggacttggcggtgaaggtgacggagccaacacccttgatctccacgccggaggcgtccccgaacttgacggtgcctcggacgctggagtcgaactcggtgaagaactcccgtcggccggtcatgtgatgggtggcgccggtgtcgaggtaccacccatcagccttgtcgttgctggagccgtcacagagggagacgagtaccttcggctcatcaaggtggaggaaagccgctgcggccggtgccgctggaggtagctcgatgcttgcgtgagctaggagcagagccggctcttcctcctccacccgtgcgacgtgggcctggccgcgtcgtggctgtcgacagtctttggcccaatggccaagcttgccacagttgcggcaggtgtcgtctcgtgccggcttgtggttgccggtggcaacgccctgggcgcctctgcgggcgccaccctcggcacgtcttcgcgcccaccgtagctggacacctccccgcgccttgcgcggcttatggccgcctgtcggggaagatgactcccccttcctcccgtcaccctgagaggcctcccactgctcccgagtgagatggagcttcccgccgatggtgatgggccccgagagaggccgtggctcatcaccatcgacgaccttgaggcgacctaacgcctcctcgatcgacatcgtggagaggtccagcagagattcaatcgagcgagcgatctgcctgtacttctcagggacgcagcggaagagcttctcgacagctctctcctcgtcgtaggtgtcgtcgccgtactgcaccattttctgcaagagagtgttgagacggagagcaaagtcatcaacatcctcacctggcttgaaggccaggttctcccactccttgcggagtgcctgcagtgtggacttgcgggcgcggtcgctgccgatgcgtgccgcagcgatggcgtcccaggcctccttggcagtccgcttctgggaaagcgagaactgcatctcgggcggaactgcagcgatgagggcatccagtgcccgccgatcctcgtcgtagtcgacgtcaccgtaccggactgcctcccacatgtgccgcacctggagcctcaccctcatcaccgcggcccactcgatgtagttggttttggtgagggtaggccacccaccgccgggaccaaaatccctgaccaccgtctggacgccgtggtgaccatggcgccggtcaggggagagggagccgtgccgcctgcgagggccgcgtgcgggctccgggctgccgccggcacgcccgcgcccgtctgggttcccgtcggcgggcgcacggtcccttgggccgccgccgccgccgtggaggtgggctgctgcccaccgctctgctcgctcccgtgcccttcctcttgccagctcctcaagctccctgtcagcggtgatgtcgccggcgatggagccgttgatgctgctgcgcaaggtctcaacctctacctccgccgcacgtgccgcatcttccgccgcctccgcctccgcctccgccctggctgctgccaactccgctgccgccagtctggccgccctcgctgctgctgcagcggtctgagccgttgctcgcctgcgctcttctgctgcggcgagctcggcgtcctgctgacgccgagtgctcgaggcgaccgaacgccgagaccgagcgtcggacatggcgcacctccggggggctgctgtgtggagagggggaagggaaaggggaaggaggggcaaccggtgctgctgctgctgctgctggctgagagctcaaccgagcttgggaaggggtggaacaagagatgtttagcctacaggaaagtgtggctctgataccagatgttagaatttcaatggttactctcattgagaagaggatggcactcgagatggggcaattttctggttttcttcattcactaaacacaaaagccatgtcctcccaaagaggattggatacatatttatagctgcttgtagcagccatgcagccatgctagtctaagagggtgctgtcagcatcccaacaaactgtcctagagcagagcatcccaacaaactgtcctagagcatctcaacaaactgctgtcctaactgtcctagagcatccaaactgaaagtagagatgctgtcctagaaagctgaaaagcaggaaaaaggcaccacaagaccaagaccaaccagccaagacttattcctacaataaatgcgttagtttctctttacttccaagactggcagcttttgcttgagcttccgttacattttctagaccagtcaactctaattctccgacaagatttatgttttcgagttcggaaacattgctgcaactagagctagaacccaccacaaaaaaggttaatgtctgtagagaagtcagttgtccaaggtcaggaggcatgcattccaatgattcacatccaccagtgtagatatggcgaaggtttttcatatacttcatagcatttggaagccggcatagagagtcacaatcagaaacgtccattgtcagtagattatatagtaaacttatttcttcaggaagttttttgatccaccaattgttggaaaagttaagatacctaatgtattgcaagtgccttggcctgattggaagttttctcaatcgacagagttgcattgcccgtaaagaattgtgctttgataaccgtggtggagagacataagtgtagggatctgtatataacaacgtttggagtgttggagattgcttcttcagcataccatccagatgagtgtgaatttctcggtatgatatgaacaagtggcgagtaggatttataaatgacttcatgtcgggcatattgactatggttgcacattctttccccataacagatagagccacatcatgcataagatcatgtatcttgcacaccattatgtaacggaattttggtcttcttacataataaccagtcggtggaggggcttgttccacatcttgaaagaatgatctccaagctagatcattaaaaatttctttgcctaccatgtcagggttatcttcctcccgtgcaggtataaagtcatgagccatccaatgttggatcaatctctccacattaatcggataatctttgggaaacaaagcacaaaatgcaaagcattgcttcatgtgtggtggtaggtcatcgtagctgagctttagtataggtaaaatctctgtcttctcattgcaaatgttgcttttgactaatatatccttccattcttgcatgctagtcttggtactcaacatagagccaaatgctttggctgccaaaggagaaccgacacatctgtccacaatcttgtcaacaattacatctagctcgtcactgtttggcttttgcactctgaatgctctgctctggattatttccttcatatacttgttacccaatttttcaaggttatatgctccaggtacacccatggtcataactcgagctacttctgcatcacgagttgttgtcagtatcgtactgcccctgccaccttgcttaaggcatgtcaacagttttccccacttgtcagcatcccgattccatacatcatccagcacaataaggtatctctgtccacttaattctttctggagatcctgcaaagctttctcatgatttttctcctggctatggcagatgtttcttgcaatgttaccaatgtcgaaatcatctgacacacaacaccacctttggagactgaaatgctccttgacttgaggttcattgtaaatgagttgcacaaaagtagtcttgcccaaaccacccattccaacgataggaagaaccatgagacccccatttccctcctgctcaaccaatatctttatgatcttctccttctcctcgttcctagatctgctggcaatgtccttgtcagagtcaatcattatgctatcagtctgccgccactgcatcgatggtgtcacttgctgcctttgtgtgaatccaaagtcattcatctgtctgacaaggacatccatggtacgcacaaccttgctcagcttcttgctcattctgtaacggaatacaatagggttacgagaagggaagaggcttataacatccataccgagcttgttgtagtgcccctttttcttggcatcacgccggagcgcttcatacttgaactcatcaaagacatcgatcacttcataggacacattcttgagtgcttcgagccaagcactactcctggtcggctagcccccttctgtgcatcttcaatgacatccaggatggccggaagcttgcgtgccaggctatcacgctgctcttccatgcctttcatcaccttgtactgctccacaaggtagctcgacaccttctccttcagcaaggagaccagcggcctgatcaccaccatctctgccattgttgctatcgccactcacgaggtcacgcttacagaacacacagcagctttggagagctcaaaggcgaaattatttgggacgaaagagcgcgtcaaaaggcattggctttctgagtcagtcaagcaatgttcgatcatagaatattattcctgcacaaacgcacaaaggtctcgaggaaggaggcctgaagctgccagaaagagaagaatcaaggaaccctacgcgttggcctcctaaatgctcttttactgttgcatagctgaatagttgaatgatttgtgataactattcgaggctataaaattagagaatggattcgaaacattattcatatataaaaagttcttttaactcccatcgcgctgtttaggagttcagaaagctggcctttaatccattcatctatccaataaagaaataggagaatttagaaaaagaacagaagaaaatggataagattaggcatcagattaacatcaagcaacacaaagatgggaccatgatagctcaaaagagcgatttcattcagaatagtcgctcgtaatgatgattcgatttggaaagtaatcgccaacaattaaaattcaggcattcgtgtacttgatagcactctacacctaagcagctccaacaataccatggtagtagtgcaacaaatgcaaattcttaacgcaacaaaaagaaatgttcttctgttacagaagaactacacttattgtaacaactctatgaagccaaaaacatttttttttgctgctttcgagaactaaacattacttgcatcagcactcgagaaactgatttgcaacaaaatacagaagtcagtacaacagtacgagaaagatgctttggaacaactaaaaactatatatttgcaacgtacaaagagcccaatttgcaacattacgacaaaaccattaaaaataattcggctaaccttgtcttatctcagcaggaggaaccaccgcaacaaattgccgcagctccgctgctacagtaaatccgaccaagccatcagtggcaaagccccgatctcctcctcctcctggcgtccgcacgagaggcggctgtacctcctcttgcttgcagtagccatggctcgtaggtaaggttggatctacgggagtgtccagatctagggaagagtgagatagagcaacagggagagagatgaaaggggaagatgaacggtgaacggagaagaaaagaactcgtttggatgacgattatcaaaaattctaaaaataaatttactacactcttactacccccataagttttagaggtagacacggttattaacaaaaataggtaaaattaaatggtgaaaaaattatgattggttgaaaagtggaggtagatgggaaaattgaacagtgaagggttatgatttgttgataagagaatgttgatgaaaaagttgtattttgggataaattgaaaaggctaaaagttattatattttggaatagagagagtacaatatatttatacaactccacgtaatcttaggtccaaaatgaactcacacgttgagatctttatctctatctttgtctctactactatataaaaattgaagatgtttccgcaaaaattttagtatatcatgcgtgtttcaatcagttttgattttattttttcatcgtattctttctttttatttatgctatagtgttcctcttatcctagatgtacacgaattaatttggtccgcacctttttacgcacgccgcgatcaggctgttttccaaatacgcatttcgcgccgccgcaaaactttatcaatcaaatcagaaccaaaaaaaaaatacgcaaaacttcacgcgtcgcgcgtcctgtttttgtcaaggattttcgtccatctccgatagatcatagcgcgggaaaaaatagaaggcaccccatcgtatattgtggatgtgttcagtttacgaaaagaaaatttttcgatgtcatgaatgacatttgatcggatgttggaaggggtttcggacacaaatgaaaaaagtaaaaaactaatttcataacttgcctggaaaccgcgagacgaatttattaagcctaattaatacatcgttagcacatgtaagttcctgtaacacttatgagtaatcatggactaattaggctcaaaacattcgtaccacgatttccatgcaaaatgtgcaattagtctttttatctatatttaatgctccatacatgtgtccaaagattcgatgtgacgtttttgaactaaacaaggcatgtattacaccatactccctctgtccccagtataagagattttaacattttacttctactgtttaaccatttgtcttactaaaaaaatttagagttattatttatttttttacttactttattatccaaagtactttaagccgaacttttcgttttttatatttgtacaaattttttttaataaaacgagtggtcaaacagtgcaagtaaaatgtcaaaatcccgtatattaggggacgggtggagtatcagctgtttggattggttcactatgcacgagtatttcatcatcctttcgccctttgcgattcgtcggtttggatattttagagcaagtataatagtaggctataagttggctaaatgttaaggtgggggagaaaagagaggagagagaggagaagcgggcggtaaacttacagccggcttagacacatgaaccaagaaactctgtgagagagacaagtggatcttgtattaattgtaaaaagctaactattatatgagtaggtgtcggtgacatgggatcaggagtatcatgactagaggtttgaggcagacacaatcgcacacgtggcctggcacccccgagggacgtcgggcccgagggtgatgtgttcgccctcctcttagtccccccgagggggtcgggccgcacccgcctcggccccgagggccgaggcgccccgacccctcgtgggtttttgctccgagtgtatgggttaggtgagcacagtggggctcacctaaccacattttttgcggtttggctgagcgtgtcacgccgcatgtaacgcagtgcagtgcactcatttatccggtctgtgaccagtcacagaccggtcagatcgcgggttaggtggcgacaggcgatctgacgcacgcctcgccccatcccgtcaggacgagggcttctaggcgctcgcccccagctggagctagcgtgttacctcccagagatggcacgatagtcctggtcagatatatgccaggcttcatcctaaccattacaggcaagatgttgtgtgaagaagggcgaacatgtagattgctaagctgacacgtggtggacaagaatgaccgacgtgactggtctgacaccggtcatgtcgtcagcggacagccacgattccacgtcgcatctgctcccggcgaaagtggaggtagttgtgggccgtctcatcagaaggtgactcggacggcaactatacaaatctacgtccatttatgaaaaggtggggtaagtccccacaaaaaagagagaaatggtgcatgtggtatccccttaagatataaaaggaggaccttgcccacttagatgggggactggacttttccagattaggaactcagaacaagggagaggctggcatatactttgtagctccttcatacacagatctcccaaaaacacaggagtagggtattacgcttctcagcggcccgaacctgtatacatcgcccgtgtcttgtgtgtttcctgtctcgcgaaccttccacatacagagagcttagaatctcaccctgagtccccggccgaactggcaaaggggggcctgcgcggtctcccggtgaggagccccacgctccgtcatctggcgcgccaggtaggggactctgcgagggattttctgagctctcgcactctttcgtgtgcgccaagcttttcctgttcagcccaatggccgagccagcaaaggcgcacgacctctccccgagtatgagcggtgacgacggggagccaaacccacgccgtcgagctcgtactccaccgccccctccacgccaaagtcctaggcgggagaaggcgctcgagagggccgaaggatccgcgacttcgacacccactggaggtggagaagggcggcgagatggggagcgtcgcctcctcgtctacggcgacggcagcacgccccagggcgcgctccaagctgcgggcgcgctcctacgtcacccgcccgtcgcccatgacccggagtctccagcccaacgttggctggacgatgtggccaaattggtcatgactgcacggcagcgcctagatgctggtgggcggtcctccgccaccaaggcctctggtgctgctaccaccggctccgcgtcgtcaagacggagggcgcggcgagcggcagccgctgttcgccattcggccgccactccttcgtcaacgcctccgacccgggaagatctgcgtggggaaccggatgcccgcatcagtatcgagcgtcggcgtaatggccgacgtgctccccacgcaacggagggcgcctcctcgtccggagtgtcacctcaccacggacgcggggattagtcctccgtgcccccggttggtggtgtcggctgtagagcctttgtggcgagccttcggaatgtccgttggcccccaaggttccggcccaccatcgccgaaaaatatgacgggagcgtcaaccccgccgagtttctccaggtctacacgaccgggatcgaggccgccgggggtgacgacagggtcatggcgaatttctttcccatggccctgaaaggacaggcgcggggttggctaatgaacttgccacccgcgtctgtccactcttgggaggatttgtgccaacagttcaccatgaacttccaaggcacatatccgcgcccaggtgaggaagcggacttgcacgcagtacagcgaagggatgatgagtcacttcactcgtacattcagcggttctgtcaagtccgcaacaccataccatgcatccctacacacgcggtgatttacgcgttcagggggggtgtgcggcacaaccgcatgctcgaaaagatcgcctccaaagagccccagactaccgcggagctttttcagctcgcggaccgagtggctcgtaaggaggaggcatggacctggaacccctccggttccggtgtggcagcttcggccgcccccggatccaccgctcggatagggcggcgtgataggaggaggaagaagaggtcagcccataccgacgacgagggtcatgtcctcgccgtcgagggcgcttcgcgggccacccgaaaggggaggcctgcgggagacaaaaagaacgaggccggcgctcccaacagggagcgcccaaccggcaagtggtgcaccgtccacaacacttcccttcacgacctcgcggactgccgtgcagtcaaaagtttggctgagcggacgaggaagtgggaggaggagaggaggcaggagcgccgagagggcaaatccccggcggttccttccggtaatcggcgaagtgaggccaagcagaaggcccccgccgaggacatcgatgacggcgatgatgacctaggtttccaagagcctggagccaccattgccaccgtcgatgggggagcgtgtgctcacgtttctcgccggagcttcaaggccatgaagcgagagcttctggccgcggcccctactcatgaggcgacgtgtcgggcgcggtggtcggaggttgccctcaccttcgaccagaccgaccacccaccgtgcgttgcccggggagggcagattgcgatggtggtttctcccaccgtttgcaacgtgaagttggggcgtgtcctcattgatgggggagcggccctcaacatcctttcccctgcggcctttgacgccatcaaggccccggggatggtgctccggccgtcccagccaattatcggtgtgacgccggggcacacgtggccgttaggtcacatcgacctaccggtcaccttcggtggatccgccaacttccgcacggagcgggtgaacttcgatgtggcggacctcagtctgccctacaacgcggtcctggggaggcccgcgttggtgaagttcatggcggcggtccactacgcctacctatagatgaagatgccaggccccggtggccccatctctgtccatggcgacctcaaaatcgcgctcgcttgtctggagcagcgcgcggaccacctcgccgctgcgtccaagcccgagggtggcgacgagaggcttggcgcctccgcctccgccaccccgaggcagcggatgatcacaggcgacgaggtcccggtcaaggaggttgccctgggcgacggcccgtccaagaccacacggatcggtggtcttctggacggcaaataggaagacgcgctcgtctccttcctgcgggcaaacgctgacgtcttcgcatggagaccggcggatatgcccggggtccccagggaggtgattgagcaccgtctcgccgtgcggccgggcgcaaggccggtccggcagaaagtgcggcggcaggccccggaacgtcaggccttcatccgcgaggaggtggcgcgacttctggaggccggattcatccgtgaggtcatccatccggagtggctggcgaacccggtggtcgttcccaaggcgaacggcaagcttcggatgtgcatcgaccacaccgaccttaacaaggcatgtcctaaggatccttaccccctgtctcgcatagatcagattgtcgactccactgcggggtgtgaccttttgtgttttctagatgcatactctggttaccatcagattcgcatggctagggaggatgaggaaaaaactgcgttcattacccccataggaacctattgtaatatgacaaagcccttcgggttaaagaatgcaggtcctacttttcaacgtactactcgaatttctttgggtagccaattaggacgtaatgttgaggcttattgtcacgtccagataaattcatcccgaaaataaaaatcattctctaaaaggaataatagaattaattaaaattcgaaaagaaattggcaaacactaaaatacgtacaagaaaaatccgaatgtggcccggagaatttttgttaaattctccttggtctaaaaggagccctcaaattttacttgaattttcagagcaccggaaataattattaagcaacaaaaacaattatcaaagtttattaaaaagaaaatctaaaaataaccctctctttccctttgggccaagtttggcccaaagtcctctctctctctctcggcccgcggccgaagtccctctcccctccctctattcctctccctctccttctctcttgggccttcccttcccctcggcccagctccctcctccctctctctcccgggctgtctctcccccccctcccggcctgcccggcccaagccgcctccccctcctctcctcctgggccggccgcccggcccaacccgagcggcgccctcccacccgtgccgcgcacgtgcgcgcgcgtgcgcgccgttgccgcgcgctgaccgcgcgcccgaccgcgtggggcccacgcgtcaggcgcgtcgtctccctcctccagccgcccggccacctctctctctctcccggaaacctagctcgctccctcctccaaatccgcttgattcaattggccaattccaaaattaattggggggttttaatccccattgaatcctcttcaaatgcccccaaattcccccttgattcgtgccttcaatccccgggaacggacgcgccaagtccggccgctttccatggccgtcggccgccattcccgccgccgttccgacctcccccgtggccggctccctcttctctcatataaaatgggatcctcatcccccgttctctcgttttagccccctcccgagcctccccgtggtccctagccatctccccgccgccctcctctctctcccacgccgccggccgcctccagccgcctgtgccgcctcgaccgtgcgccggccggccgcgccgtcgcctcctccagcgtcgccgccacctcctccaccccggcctgccctccgtttcgcgcggtgaccgccggaggcgcgttcccgccgtcgcccttctctttcctccgcgccggccgcctccagccgcctctccctcctcgccggagcaccgtccggccgcgccgtcttctccctcggcctcgcagccacctcctcaccctcggtcagccctccgtttcgcggggaaagcaccggagacgcgtcctcgccggcaaaacagtggcgttgccgccactgttccacctccggccgccactgtcgcgtttcccgtgcgccggccgacgtcgccaccacctccctcggctccgcgacgccgccctccaccccggctgctcctcggtttcgccggaacgccgtcgccgcgccggcctctccatcctcttcgtcgccggcgtcctttcggccacccattcctcctcgtcggctcgtcgccccgctgcaccaccaccttctccaacatcgctgcggcgtgttccacgccgtcctcgtctccgtgcagccgctgccggctgccctcgtcgcctcctcgccggctccggtcgtcgtcgtcgtcgtcctctcgtcgttcccggtttcgctcgttgtggcgttcgtccctccgtcaagccgttcttgtccgtcgtccgcgtccgtcaagtgtgtcgctgcagcccccgtcgtcgtcttcgtcctcggctccgcgtcgtcaagcctcgtgccggccgcgtctcgccttcgtccaaggatcgccgccgaagtcgtcccctcgccgttcgtctccgtagttcccggccgcctccgccgcgcccgttcgtcgttgtcgttcccacgcctcgtcgcgtggtggtaaggatccctctccctcgctgccccgtcctcgtcttttcggtgtcgcccgtacccgttgtgcggtcgtcgaccccggtacccgtgtaccggtgtcggtagtcgttcacgtgtgcgggtggtgaccgtgtagtgtccgtgttagtgtgcccgctcggtagccgcgtggtttccacgtgtgcaacccgtgtggtgtctagtggagtctgtttgtcggccactcgcctcggttgacacacggggtccgcttccgtcgacccgtggaccgtctctgtgtacccggtctaccgcggtcctttaggttgacatgtggggtccgcatgtcaacggcgcagccttcctgtcttttccaggctagcgcttccacatgttttatatttgcaaagcttaattataataatccgcaaatctccatataacagcactaaacttcggatgatcatatcttggtcatacgagctccgaatcgaccgttcaagtctcttaatgtttgatataacctaaagaaccctgtgctttctttttatgtattgttattgcttctttataggcttgtagctttgcttgtgtgcttcgcgtagcttctgtcgttccggaggttcccgaagcgtggttcgtggtcgtcgccgaaggttcggaagtccgttctctctgagcaaggcaagtcacatcatccttgagcatattgaatcccagtttataaaattattttgatttaaattaatgcattatcgctttatttaaattcccgcgttatcactgttttatttagccatgcctatttacctttgttatgaccttattattattgctattgttattattaccttgttcaccctagaataaacaaaaccccaactagtgggtactctatttatggttccactagtatgaacttaggtagatgcttcgctggttaattaggcaacattaggtggtttttataactttagactttgggaattctcatatcatttggacactatggaattgttggattatggtggaattggacatacccctctcttcctctttcaaagcccctaaaatctgttttccggtggggtttgggtgcatgccagttgtgggaagtagcaccccggccactataaggattaagctcgggcctctgttgcaaagcactaccgtacttccacatgtctagtgggtaaggcttagtttgtggctcagtctggttataaacaaaagtacacggattggagatggatgaagtcgggggtcgatggacattctccagggcaaatgaaggctacacgagctgcggcccggtagtcgagatgtcatggcacagggctggcgtcctgctgctagggggctcaatcctgcctgcctgtcccgggggttccggccgtaggtggggttgggtcggtactcttgtctatggctaggatgggttggaaactatgtcacgtcttccgtccatataccgtggtggtatgtggcacgtggttacacgtgaggaagatgtgtcttgtgggtaaagatgtacacctctgatcagagtataatctattcgaatagccacgctctcggttatgggcaagccgagcaatgtacccaagttagtgttttaattcttaaaacctgcttaacaactaaaatgtggaatggttggcctgggttggcttgggacgagctgggacccagggtcgggttgccagttcggtctgaatcatcgtaggccttgggttaaggcaggttcgtgtgggttcacgaccttgtttaataatattgtatagctctagaatcgtgtttataaaatggctttgggtaactaggtgacttttaaatgcggtttactgcaaaacttaacccctattattatccccttgtacccccttgcattaatcatgcatctgctggtgtgacttgctgagtactgtggttgtactcactcttgctcaatcttttcccccccttcagtaagagaagctttggagaagaagtcttaggtggagtcctggcttataccccagttgagcgcctatgaagatggagccgtaggcccgctagtccgctgctgtttatttttgattgccaggcctgaagtgcctttgtaataatgtaaatattatcgatataataaagatgtgtcttttatatcatgtttgtgtggtgtaccccggcttttcctgggacggggattaatacactagcgttcgggaaaatgcaaattttctcggtcgcgacaagctggtatcagagccatctcgactgtaggataagccaagtggataaaacctaaggacatattttataaatgaaactatttgcgaaagttccttttcctcctttccctaatgctatttgcaaaatgtttacttccttcttccttcttcggatttcaactagtactagatggtcaggtcagtgaagaagaagacatcgtcagttgtttgccgaagctccggaagactgcaggatccgctagcgaagtggaggaagcagtgaagccagctgtgaagcaggagtgaagatcttgggaaccagtcgtagaacctaagccgtcctctaggatagagtcgtttgtcgtgtgtttccttgcttgtgtgtgtagcgcgtggtttgcatcggtgggttgtgatgtaaccatgctaggttgtttgcttaatcaacttgcagaataagcaaaacaaacaacacatcaacaaaaagagttagttcctttaaggtcttgtccctagttctggtcgattctttccttgtatgcttcccctctcaacctctaccttgtgacagatggataacactggtaacaaaggctatgggaatgatggatccgatgactcaagaacccaagccaatgggaatgagaaaagcatcaacgaaacctcaccagagctaatccaaattgtggttaaccaaaccaacatgttggcaacagcctttcaactattacagaattggaacaacccagcaggggcaaccaacgttcaagtacctacagtccagcaacagtgcaagttatcagaatttctcaaaactgagcctccaacctttgccattgccgtcgatcctatggaagccagtgattggttgcgcacagtcgagaagaagctagggttgattcagtgcaccgaccaggagcgggttggcttcgcaactcatcagttggttggaccggcttcagagtggtgggatagctacgaagcatcacggccagaaggatataccatcacctggaacgagttttcatctgtattcaagagatcacatgttcccgcaggaatgatcacactaagaaaacgagagtttcgctacctgaagcaaggagatttgaccgtcacagagtacctgcacgagttctatcatttggctcactatgcaccagaagatgtggaaacggatgaagacaaacaagagaagtttctccaagggttaaaagatgagcttgcagtgcaactactcctagaggattatgaagattttgagaaacttgtggacaaagccatgcaacttgaaagtgagcataatcggatgacgaactgcaagagaaggattgtcaacatcccagtatttccaggtggtaaccaaagacagcgcactgagccacttcagatcaccggatcttctgttgtgcatcaagagttcctgccccaagaagatggacgcaatgcagacaacaacactagcaatactaatgatgatgataccaccaacaaccatggttcttgccccattagtgaccactcgaataaagcgtgcaatgtcagtagcattcaccaagatgtcaacgatagtatcaatgttggaacccagaatgacaaccttagcaattttgacactgagaaagactccaatggtgatagcaactatggtaccactgatgccaatgttagcaaggatttccaaccaccaattccaactccaagtcaaaatgatagtccccagatggacagctcagtaaagaagacgttgatttgttacaactgaaaagaaccaggtcatttctctagagattgtccacagccgaagcgtaacctgcgccatcactccggccattatgcaagaagaagacaagtcactcgccttgtggtcactggagcaaacgccgtacctgtgaggcctcatgttaatcctaacccatagtagaaacaatgtaccgatgttaagcatcttccctttttgtttaaggtagtgccttgtattcatgtaataagggagaaatgggtaatgcagacaagttctattaggattcttttggaagatgcggatatgtgattatgtgtataattgcttactgataaaggagacctagggtctcatttcagaggaatcatatactaatctcgagttaataaccaacctgttgatggaaaagaaaaccaattaaactgtgttggattaaaaagccaaagagacttttgtttggactgagagtttcagatgtgtcctctttggatcaaaggcaacaaccgccagtctagcttttgacgaaccacttgaaggtttctctgaaaggcagcaggctcaagtaccacatcgtcaccagaagcatccgcaactctcggagtgaagagtacttagttgacaaaggtcaaaagatgattgataaaagatatcgaaaaagatgtttattaccaggcaaagaagtaggtcgaaaggtgattgataagagaaatcgggaaagaacacatcaaggtcaaaggtgtaaaggaatacgttgaatgctaacggaggacaacatgaagagaatagtgggaagtaaactgaatgtaaagaaagtgaatccgagttgcttgttcatgggagctattcccagttatgaaccaagtgatatgttcgaagatagtttacagaggtcagattaaaatcacatgtaacagcgaagcttcagatttggcagggtaacgatcaaacaataacaagtccagcagtaaagtcatctggaaaggcgtcaaagcatgtcaagtgggataagttggctctgttgagaaacataattgaaaagcgaaaattatcgaccctcgcatcgaatagcggaagtagctagcacccggagaccaggaaagctaatatgaggcaatttgtggcaacttagaagtaaatgacaagcatgatattctcatgatgacaagcatggtatcctagtaatgacgagctgatctcgacgcataacgtgaaatgggtaacttctatgaggttgacgccaaaaatatgaactatgcgaagttctggaactgaagcaccatcttcaagtgccgcaacccagtcgaagtcagctaaaggttcaaccagggacaagtcaggtgaagagaagattccatctgcaacaggagatcgagccaagcagtccagagtggaggagttctgctaggcaagtttgttatagaagacggagcggaagaagtcagacaagaagagaagaccgctcaacctatcttcttgctagcctcctcgaatctcggggacgagattcttgtaaggggggtggatttgtcacgtccagataaattcatcccgaaaataaaaatcattctctaaaaggaataatagaattaattaaaattcgaaaagaaattggcaaacactaaaatacgtacaagaaaaatccgaatgtggcccggagaatttttgttaaattctccttggtctaaaaggagccctcaaattttacttgaattttcagagcaccggaaataattattaagcaacaaaaacaattatcaaagtttattaaaaagaaaatctaaaaataaccctctctttccctttgggccaagtttggcccaaagtcctctctctctctctcggcccgtggccgaagtccctctcccctccctctattcctctccctctccttctctcttgggccttcccttcccctcggcccagctccctcctccctctctctcccgggctgtctctcccccccctcccggcctgcccggcccaagccgcctccccctcctctcctcctgggccggccgcccggcccaacccgagcggcgccctcccgcccgtgccgcgcacgtgcgcgcgcgtgcgcgccgttgccgcgcgctaaccgcgcgcccgaccgcgtggggcccacgcgtcaggcgcgtcgtctccctcctccagcggcccggccacctctctctctctcccggaaacctagctcgctccctcctccaaatccgcttgattcaattggccaattccaaaattaattggggggttttaatccccattgaatcctcttcaaatgcccccaaattcccccttgattcgtgccttcaatccccgggaacggacgcgccaagtccggccgctttccatggccgtcggccgccattcccgccgccgttccgacctcccccgtggccggctccctcttctctcatataaaatgggatcctcatcccccgttctctcgttttagccccctcccgagcctccccgtggtccctagccatctccccgccgccctcctctctctcccacgccgccggccgcctccagccgcctgtgccgcctcgaccgtgcgccggccggccgcgccgtcgcctcctccagcgtcgccgccacctcctccaccccggcctgccctccgtttcgcgcggtgaccgccggaggcgcgttcccgccgtcgcccttctctttcctccgcgccggccgcctccagccgcctctccctcctcgccggagcaccgtccggccgcgccgtcttctccctcggcctcgcagccacctcctctccctcggtcagccctccgtttcgcggggaaagcaccggagacgcgtcctcgccggcaaaacagtggcgttgccgccactattccacctccggccgccactgtcgcgtttcccgtgcgccggccgacgtcgccaccacctccctcggctccgcgacgccgccctccaccccgactgctcctcggtttcgccggaacgccgtcgccgcgccggcctctccatcctcttcatcgccggcgtcctttcggccacccattcctcctcgtcggctcgtcgccccgctgcaccaccaccttctccaacatcgctgcggcgtgttccacgccgtcctcgtctccgtgcagccgctgccggctgccctcgtcgcctcctcgccggctccggtcgtcgtcgtcgtcgtcctctcgtcgttcccggtttcgctcgttgtggcgttcgtccctccgtcaagccgttcttgtccgtcgtccgcgtccgtcaagtgtgtcgctgcagcccccgtcgtcgtcttcgtcctcggctccgcgtcgtcaagcctcgtgccggccgcgtctcgccttcgtccaaggatcgccgccgaagtcgtcccctcgccgttcgtctccttagttcccggccgcctccgccgcgcccgttcgtcgttgtcgttcccacgcctcgtcgcgtggtggtaaggatccctctccctcgctgccccgtcctcgtcttttcggtgtcgcccgtacccgttgtgcggtcgtcgaccccggtacccgtgtaccggtgtcggtagtcgttcacgtgtgcgggtggtgaccgtgtagtgtccgtgttagtgtgcccgctcggtagccgcgtggtttccacgtgtgcaacccgtgtggtgtctagtggagtctgtttgtcggccactcgcctcggttgacacacggggtccgcttccgtcgacccgtggaccgtctctgtgtacccggtctaccgcggtcctttaggttgacatgtggggtccgcatgtcaacggcgcagccttcctgtcttttccaggctagcgcttccacatgttttatatttgcaaagcttaattataataatccgcaaatctccatataacagcactaaacttcggatgatcatatcttggtcatacgagctccgaatcgaccgttcaagtctcttaatgtttgatataacctaaagaaccctgtgctttctttttatgtattgttattgcttctttataggcttgtagctttgcttgtgtgcttcgcgtagcttctgtcgttccggaggttcccgaagcgtggttcgtggtcgtcgccgaaggttcggaagtccgttctctctgagcaaggcaagtcacatcatccttgagcatattgaatcccagtttataaaattattttgatttaaattaatgcattatcgctttatttaaattcccgcgttatcactgttttatttagccatgcctatttacctttgttatgaccttattattattgctattgttattattaccttgttcaccctagaataaacaaaaccccaactagtgggtactctatttatggttccactagtatgaacttaggtagatgcttcgctggttaattaggcaacattaggtggtttttataactttagactttgggaattctcatatcatttggacactatggaattgttggattatggtggaattggacatacccctctcttcctctttcaaagcccctaaaatctgttttccggtggggtttgggtgcatgccagttgtgggaagtagcaccccggccactataaggattaagctcgggcctctgttgcaaagcactaccgtacttccacatgtctagtgggtaaggcttagtttgtggctcagtctggttataaacaaaagtacacggattggagatggatgaagtcgggggtcgatggacattctccagggcaaatgaaggctacacgagctgcggcccggtagtcgagatgtcatggcacagggctggcgtcctgctgctagggggctcaatcctgcctgcctgtcccgggggttccggccgtaggtggggttgggtcggtactcttgtctatggctaggatgggttggaaactatgtcacgtcttccgtccatataccgtggtggtatgtggcacgtggttacacgtgaggaagatgtgtcttgtgggtaaagatgtatacctctgatcagagtataatctattcgaatagccacgctctcggttatgggcaagccgagcaatgtacccaagttagtgttttaattcttaaaacctgcttaacaactaaaatgtggaatggttggcctgggttggcttgggacgagctgggacccagggtcgggttgccagttcggtctgaatcatcgtaggccttgggttaaggcaggttcgtgtgggttcacgaccttgtttaataatattgtatagctctagaatcgtgtttataaaatggctttgggtaactaggtgacttttaaatgcggtttactgcaaaacttaacccctattattatccccttgtacccccttgcattaatcatgcatctgctggtgtgacttgctgagtactgtggttgtactcactcttgctcaatcttttcccccccttcagtaagagaagctttggagaagaagtcttaggtggagtcctggcttataccccagttgagcgcctgtgaagatggagccgtaggcccgctagtccgctgctgtttatttttgattgccaggcctgaagtgcctttgtaataatgtaaatattatcgatataataaagatgtgtcttttatatcatgtttgtgtggtgtaccccggcttttcctgggacggggattaatacactagcgttcgggaaaatgcaaattttctcggtcgcgacacttatgtcgatgacttggttgtaaagacgcgtaaccaggaaacgttactctcagatctagcggaaacttttgagagtctccgctccgcccgcataaaactaaaccccgataagtgtgtgttcggtgtacctgcgggcaagcttctcgggttcttggtctctacccgaggcattgaggccaaccccgagaagatacgggctatagagcggatgcgcccccccagcaaacttagggatgtgcaatgcgtcaccggttgcatggccgccctaagtcggttcatatcgaggctgggagagaaggcgttacccttatttaagcttctcaaacgctctggaccgtttacctggacggaggaagccgaaaatgctctcacccagttgaaggcgtatctaagctctcccccagttctggtcgccccggagccagacgagcccttgttactctacttagcggcgaccccgcaagtagttagtgcggcattggttgtggagcgcgatgaggacaattctcatttcacgcttccccaccctgtgccgacttggcccgggagagagcagggaggagaggctcccgagccgaacggtggcccaaggcccccgacgaccggagttggccctctgcccgcttgtcagacggtgctaggagcccccgacccccaggaaggccctgaggccactgtgggaaggccgcacctatcgccctttgaccccgaggctaaccctgtgctgactcgacccgggaaagagcagggagaagaggcccccgagccgaacggaggcctaaggcccctgacgaccggagtcggccctttgcccgcttgtccgacgacgccaggagcccccgacccccaggacggccccgaagccactgtgggaaggccgcccctgttatcctccgaccccgaggtcatcagcacagaagacaagtgcgccccgcgaggctgcttggacgaagagtgccccagggatgcggcccctagcgaagaggatcggccccaccgaaaggtgcagcggcccgtctactttgttagtgaggccctccgggacgccaaaacccgataccctcaggcccagaagatgctttacgctattctgatggcctcgaggaaactgcgccattatttccaggcgcatcgggtcactgtagttacgtcttaccccctcggtcaaatcttgcataatcgagagggtacaggacgggtggtgaaatgggcaatcgaactttctgagttcgatttgcactttgaaccacgccacgctatcaagagccaggccctcgccgattttgtggcagagtggaccccggctcccgagcccgtctcgatccccgaggccagcacggacccctcgcagctgcctcacaccgcccactgggtaatgcagttcgacggctccctgtctcttcagggcgccggtgcgggggtcacgttgacctctccgaacggagacgtcctcagatacttggtccgcctcgactttcgagcgaccaataatatggcagagtacgagggactccttgccggactcagagtggcagctggactggggatccgccgcctcctggtgttaggcgactcccagctggtcgttaaccaagtctgtaaggagtaccggtgctctgacccgcagatggacgcctacgtgcgccaagtacggcgtatggagcgccattttgacgggattgagcttcggcatgtgcccagatgggataacatgattgccgacgaactctcacggctcgcgtcctcgcgagcccagaccccaccgggcgcctttgaagaaaggcttgcccagccgtcggcgcgacccgaccccttaggggagacggatgcgcctgaccggcccccgaggcccgtcggagtccaggcctcgggacccgaggggagtgctcccaactcccttagattgattgcttggatcgccgagatccaagcatacctcatagataagactctacccgaggaccgcgaagggagtgaacgcgtccatcgcatttccaaacgctacgtgctggtagaagggaccctctatcggcgcacggctaatggaatcctcctgaagtgcattcctcgggaacaaggcgttgtgcttcttgccgatatccatgaaggcgaatgcggagcccactccgcttcgcgcaccttggttggtaaagcttttcgccaaggtttctattggccgacagctcttaatgatgcggtcgacctggtccggcgatgtagagcgtgtcaattccacgccaagcaaatccatcagccggcccaggccctgcagaccataccactttcgtggccatttgctgtctggggactcgatatcctgggaccgtttaggcgggccccgggcgggtttgagtatctgtacgtcgcgatcgacaggttcactaagtggcccgaggcttatccggtcgtcaagatcgataagcactccgcacttaaattcattaagggcatcacggcccggtttggagtgcctaaccgtattattacggataatggcacccaattcactagtgaactcttcggcgactactgcgaagacatgggcatcaagctctgcttcgcctcacctgcccaccccagaagcaatggccaagtggagcgcgccaatgcggaaatcctcaaaggccttaaaaccaagaccttcaacatactcaagaagcacggcgattcatggatcgaggagttgccagcggtgctctgggcaaaccgaactacaccaagccgagcaaccggggaaacgcctttcttcctcgtctacggcgcggaagcggttctcccatccgagctcaccctgaggtctcctcgggccaccatgtactgcgaggctgatcaagatcagcttcgcagagatgacctcgactacttggaagagcgaaggcggcgcgcggccctccgagccgcgcgctaccagcagagcctgcggcgctaccatcagcgtcacgtccgagcccgatcactctgcgtcgacgacctcgtcctacgccgcgtccaaacgcgtgctggattgagcaagctttcaccaatgtgggagggtccgtatcgagtggtcggcgtcccccggccgggctccatacggctggccacgggcgacggcactgagctccctaacccgtggaacatcgaacaccttcgtcgcttctacccctgagggggggggtcgggtgtcaggtttcgggctcgggccaaccccgcaccccctcgggcgtgtagggttggccgggggctgccacacatgcacattcttatttctttttcagtatttcaataaaagcagtttcaatttcctaaaggctgtatctgtgctgttttttccttttgaagaatcttgacttgaaataggtcactcgtgctcaatcctgccctcgggggctcgggtcggctaaaatcgccaaacggggcccagaaccgagccgtgccccgaggcgtggtgaactccgggggggaatcggcaaaaacccacaatcgggtcacccataaccctcggtcaccacgttcccggcctggccagtctcgacatgtggatctccccaggcactagccccgacccgcgccttttgaggactagaacctgggcacgagcccttattcaagctaagacacaaaaggaccacggcacagatcatcctcatctcatactcatagcaagatgaaattaacacaaaaatttcttcatttttgattacagattaagttgatctatacaaaaaagaggcccgaaggccttagaagaaagaaaagaagaaaaaactgaagaatggcgggggtctgggggctcagtccgatgcgcccggatcgccggcctcgtcgtcactgtcgtctgcaccaccggcattgccctcctcgtcggagttgggggcgaacgcgagccgaggagccgagccctcgaagctgtcgacgatatggtcggcggcatcccggacctgcgcgcgcgcgcggtcctcggtcccaggagggaactcatccagcgccatccatggagagaaattggggtccctggcctggtaactcgccaggacgagctccaccgctccttgggcgaggttactcgaggatgacttaatcgtcttctcgagctcctcggggagccgttggagagccccagccatcttcgagaggcgctgggcgaggcctccctggttggcggcgtactttacggtccgccctctccagaggcccacttgccgaccggcgcaatctaggcgggagacggcgtcccaaagcatgccgggccctacctcgcctgccaagcggagggcttcgacctccccggcggacgagtctagcgcaccctgcagatcggcgatggtgcgttcggcagctgcgaggcgggcggctaagtcgctttcgcccgcggccgccccgccgctgcgcgccctcgcgtccagctccttcgcccgcgcctcgagctcagcggcccgttggttcagtacggccctctcggcgcgggcaccttccagattacggcgcgcctgctcctcctgcgctgcctcgcggagggacaggctgtccgccagctgttgcgccgcggcctcggccccctcgagagctcgctcccgctcggtgagcgcgtcctcgcggaggcggagcgtgaactcttcttcggcgcaggcagcctcgtgcgccgccagcgttgcttcccggatggtgacggcggcctcgcggtccgccagatccctctccacgacgcaggcgcgctcttccagcgccatggcgcgcgcctcaagggcctcttcgcgccgccgggacgccgcttcggtctccgccgcccgctgttctcgggcagtggcagcgtcaagcaccccctgggcggcgtcgagcttcttccctagctccgcctcccagctcccgtattgagggcggagggtgtcctgcgcctcgttcatcacggtggtggcaatgagggcagccccccgctcctcctccacttccttggcgatctccgccagcaccttcttacgggtttcaagctccgagacgtgccggcggtgagccttacggcccacctccaccatggcctccaccgagcgtcgcccctcttcgacacgcgcccacgcggcgtcgagctccgcccgctctgcctgcagggcctccacctgggcacttaacccatccaacaccgtggtgtttgcggcggccaaggcctgcagaaggggctctgcgttcagtggggcgatagaaggcgtggggaagagccgccttggagaggatgccacgcggctcgggccgccgatggaagtgccggactcggggatgtcccccggacccggttggtcctgagcgtcgcccgagggagtgggcccaagcgacgcgcccgcggcctcgtcacgagctgccttggaagtctccatcgcctcgtcctggcgaaatccggcctcctcccgaacggcttcctcggcctggcgggcccgggcgacttcctcccgagcggcttcctcggcctggcgagcccgggcggcctcctgggcggcctcctcggcttcccgtaggcgatccacggcctctcgccggtcagattcccgcctgcgggcctctgcggccgccggatcctcggcctcagactggccagacttggaatggcgggagggacgcgacgggatctcgctgaaacaaaagaaaagaccagaagatgaacaagatgggtgagtgaaaactcgcgttgagagaatgaatacagccacgatgggtgagagacgaacctgcgagggggtcggttaaacgaccactttggaggggaaatgaggtttccccgagatggttctgtctcccccatcttgcggggccgcttcttcttgcgctccccctcgggctgcgatgttggcgcggccccctccgggcgcctgctgctggcacgcgccaccccgccccctcggggaggagatgggggaggtgttcctccctacttcctcttcccccgggcgtcggcagggcggctgctccccgggcccctgtcgcgggacccagaagcacgaccccctctcggggtagattgttcccccctgcggctcccgcctgcgccgtcgtggccctttggagctcgctcctctgaggccccgaccaccatcataatggtcaggatggaggcgcggtctggatcgctgcagagggggaggattccttggggaacgagggccgcctctatggagttgagattcagcacccgttggaccaatatcttgaagtccttaggagcccagtcccatctcacttcctggtgggtcctcgtgaagtcttcggacccggtgtactcccaggcgccccgagcgcatcgctggagcggcgcaatccgacgacggaggtagtcgccgtacaccatggcccctgtgagcccctgggatcgcaggcccgccaggcggtcgaggacggcgtcatagccatcccccagatctaccggcgcctgccagctggaggcctgcgccgggggctggctcggaagtcggaggcgcgcttcgtcggcgaggggagtgtagaaccagtcgctcttccagtcgtcccacttcttgcggagggcgcaggggatgtagcggttcagcaccggcccccgtggctggaagtagcagccaccgactaccgatggcggcgacaccgactgcacggtgaagaaccaccggaacagccgaagagatgggcgcaccccaatgaacatctcgcacagatgcgcgaagatggccaatgtcatcaccgcgttgggggtgaggtgcgccatctggagatcgtagaactccagaacatccatgaagaaagaagaaaatggcggaaccagccctgccattgcaaaggggagaaagaagacggaccgccccgggtagtctggcgccgggcgtccctcgcccagcgtgactatctcccggccggtggcagattccggcatgaagcggcgcggcagcccagcctgcctctcgctcacgatgcgggaaggcggcagcacgctaccatcgagcagagcggagccccgtgccatggcgccggaggaagagaagattaagagcgagcgcgtgtggcgaaggtagggcacaggaaagaaggagttagggcgcaagcggcgaagacaaggggaataatggcgaaaggaaggaaacagatcccttcctcagtgcctttatactcttgccaacgccgtgcccggctccacgcttctcgcgcccactatttcgccccctcgtttctcgcgcccacgcttccactaatcccattcgcccgcttgcggcgcatgaggtggatatgcggttgtggcagtcgagatagatcatatcgtgcgtgcgttaattacgctcgccgaccgaagcgacgttaccatatctccagacgaaacgaatcgccatgtccagattcgtgtgctactcaagtaatgtggcggtattgaagagaccgctcattattgacagccgagttaccattgccgatgtgcgtggtttgtgaccgttggttttctgcccaattgtggagaccggtcccacctgtcaccaagccttaggagtggcgtcacgcccgaccgtttcccttaaagagggcgattgccctggcataacgccgggggctactgtcggtgacatgggatcaggagtatcatgactagaggtttgaggcagacacaatcgcacacgtggcctggcacccccgagggacgtcgggcccgagggtgatgtgttcgccctcctcttagtccccccgagggggtcgggccgcacccgcctcggccccgagggccgaggcgccccgacccctcgtgggtttttgctccgagtgtatgggttaggtgagcacagtggggctcacctaaccacattttttgcggtttggctgagcgtgtcacgccgcatgtaacgcagtgcagtgcactcatttatccggtctgtgaccagtcacagaccggtcaaatcgcgggttaggtggcgacaggcgatctgacgcacgcctcgccccatcccgtcaggacgagggcttctaggcgctcgcccccagctggagctagcgtgttacctcccagagatggcacgatagtcctggtcagatatatgccaggcttcatcctaaccattacaagcaagatgttgtgtgaagaagggcgaacatgtagattgctaagctgacacgtggtggacaagaatgaccgacgtgactggtctgacaccggtcatgtcgtcagcggacagccacgattccacgtcgcatctgctcccggcgaaagtggaggtagttgtgggccgtctcatcagaaggtgactcggacggcaactatacaaatctctgtccatttatgaaaaggtggggtaagtccccacaaaaaagagagaaatggtgcatgtggtatccccttaagatataaaaggaggaccttgcccacttagatgggggactggacttttccagattaggaactcagaacaagggagaggctggcatatactttgtagctccttcatacacagatctcccaaaaacacaggagtagggtattacgcttctcagcggcccgaacctgtatacatcgcccgtgtcttgtgtgtttcctgtctcgcgaaccttccacatacagagagcttagaatctcaccctgagtccccggccgaactggcaaaggggggcctgcgcggtctcccggtgaggagccccacgctccgtcagtaggctaagagaaaattacaaataaccttatagccaacaacaggttaacggtattattagccttgctgttagccggacgaaatagcaaggacggtcggcgccgcatggcgtcgctgttgtcgcgggataaataccgtctgtcaggatgacttgccgagagagtcgtacctgcgctctggttcagtttgatgttcccgagctggccaacaagtgagaaccccacggtcgtgcatgctggagtgggcatccttctaggcacgtcgacgccgccatgcaccaccattgccgacccggagtacgtagccgcgcgcgtgcactccttggatcgttaagccggtgatcgtggccaatgcgagcggcaggtagcttctcgacgtgacgagtgacgacacggggcgcacaacgtgtgattgctcacgctctcgggtacgagatcgatgtttcctgctctccatggacaaagctagcatgaactagtcattggtatagacgagttaatataccgcaaagcatatgctctacgtacatcatccaaaaattcatatataattgacaaagtgaagctttgatgcgccggtcatgacgttcactggtggaaaaaccatttttggtcggtcgaccagatttcacaatagtcccggttatattaaaaaccgggactaaaaacatctttagttctgatttaaaagctccagggtatttttcaatctttaattaccaaccgggactaaagatctatttgtagttctggttgataacaccaaccgggaataaagatctccatacgttttactcccgaccaaagatttgtagttccggttggtaccaaccgaaaaaaagatcgacgcagatatcggagagatgtgccgatcggatagaggccatctccgcctctccttttgactcctctcctctcctcaacattatcttctctctcctttaactcctctcctcaaccttatctctattcctctccttatctattcctctccttctcctctccttctcctctctactacagcggcggggcgcggagggccggccggcgcgagggcggcggggtgcggagggccggtcggcgcggcggtggctggcggcctcgcggcggcgcggggcgcggagggccggccggcgtggcggctgcggcatgcggtggcgttttttttttttggagaacttgtgattcgtatttgaaattgttgtgtgatgtatttgatttgtgtgtgatgtgaatatgtgatgaatttttcagaagttgtgatgtaatttttttaagattttgtgatgtatttgagatgatcgatttgtggatttggaggcaatttgaggatgattgatttgggattatggggacaggatggggtgaaatcaatatattaaaaacagtgaagaaaagaaaagaataaagaagcaaccggatctagcctctttagtcccgattggtaacactaaccgggactaaaaatgctttatctttagtcccggttggtttttactcccggttatttcacctgggactaaagatagcgtcccaaattcgtagtcccggttgaaaaaccgggactatataggggttacgaattgggagtaaaaaccacttctccaccagtggttgcacggtaattaatctgatccagcatgtttaataggataattaagattgtgacaaactgaagggttaatctgttaacagaagtgtaattgcacaagtgctaatcagacactacacgtgcatgtgtaaattattatcggagttggtgtaagatcgcttgctgattagcttaataataaatacaagctttagttgcttgatattaatatctctcatcatcattcatatcaatgcatttcaacggacgggcattttctagtatatataaaaaaacaaattcaatgtacgaatagtagtgtaccgttaacatctgaatttctctttttttcccttcatgtatagatcgaatttgaacttgatttttgatggattgatagatatcactatactctacatgacttcattttcatttataaaaaaatcataattttgtatcgaatttagaagaaaaaggtacgcgtgagacatcccctcgagaaattagaatccactcccattgctaaacctagcatcattttttttatatagataggagaaaatgagttgtgatcgtaaagaaaaataagaatggtgaatataaaatgctaaatgatttatgataattttattagtagttttgtgatattttatcttaaaatatatagttgtgtgataaatttattgttcaatttatagtttgtaatattttgattaaaatgtctgtagttttgtgaaatttaccaaaatgaatctggaaatcataatttatatagcatgataataaataaaagctaagctacattatttaggaaaataaaaaagcacacaagaaattaaaagttaaacttcatttgttctgtagttacaattttttctgcaaattttgttttagaacataaaagttcacattttcggttctatactatcaagagttatcggttactttaatagtatccaaagttccctctattccctctattccttttcttaaggactcccatcatgttttcaatcatttgccattcactttgactctgtttaggaagcttatgattattggaaatgtaagcaaccggctgggcagaatgtaaaaacatgttttggaagctttagattctttaaaaaaaaaagctctaaagaagaagctaagctagaaagtttttctagcttttagtttattttctaaatttacagctatagcttcttaaaatctagaaaaaaaaactagaatattcaagggagctattgattttagaagttgtatctaccccaagctaccctagacatgctctagaaaggcaggtttttcaccttctagcttctaattcatttttttaattttacaaatacatcttctaaaatataggcgaaaatatgaaaagtttgaagattctagaaaaaaaaaacaacagcaagaaaacccccatacagcacatttggcaaagattgactatatagaaaattccctttctatccaaaagggttgagcgtccatctatttctgtccccgtcccatttgtccgtaccacaagtacatggacacaccgatgaagaaatcatatctcgatctgtatatagtagaaacaactcactaaatcaagaatatcgagcagataaggaagatgcatttttgaacgatcaaaaaaaaatgcttcttctttgaagacctaggactgcctaaatcagtagacaaatttatccatccaagtccctgaagaatgcgagcgagctaggggtataaatacaccaccccgcaaaggggaggttccatggggaatgtgatacaatgtgctcgatataaattacaagatataattatacgcattttccaccatctcatgcaactcttctatacttgtaaaatgtaaaaacatgaaaacagtatatgcaactcttgttttatggcaactggtcatttctttgagccaaatcgcgttgaatagaggaaccacagaatccacattggagatataacaacaaaatatgcctgcagtttggtcagggagaaacttaaaaggtattccaacaggagtaacaccaacgagacaaagggagttgttgaaaagtactcaccaagcagaacgtaattatctcagttgcgaaacctctactgtaactattggatctcattgcatcctggagaaatatctggacctacatatatgtaattcatgaatttagttacatattcatgcgttggagtcacaggatagcaagttaaccaccgtcatgtgaagcccttttggacccattagaacatgttcaatcgtcaagacactgttgtatgtaatttttcttccacattatttatagacagcacatgagacatgatgtacaataagttgcttcctccgtttcataatgtaagactttctagcattgctcatattcatatagatgttaatatgattaagacagttaaaaacaagtcaaccaaatatatcaagggcaaaggactaaaagatgatattggaagatgggtaccttatgatgaaaattttgagccaataacatgaaaatcttgagttgtttataaggtgcagaaatacatgatcgggagatggatccacccaagaagaagacattaggcttatcaacatcgcgaatatgctggccacatattgccttacagaaccgtgatacctgtaaaaagttggaacatatgtcaggagcaatgacacaaaatcattatccatcaagaaaattaggtaccgctagcttaccaatgcttctacatcagtaatacaaagaacttttatggaagcatgaactaagaaaacttcaaggacttcgagtgcttagcacaatattttcatagataccatccaaccatttcaatatgttatatatatcacttatcagtatattttgcatgcttaatgcagctaggtgagaacatggtttgaattgcatacttacaaatattaataatgcatattgcctaataaataagaggtgaacacatatatgggttcaccaacatggaaacataatcatgtaggcacctcatggtagggtctgttcattgcttgtatgaaactcctgccatgtttatatgtatgagaaaagcaggactttgtgtatgatacccccataagaaaagtgccatgaagattcctgaaatactgcagataataaaaccatcaacaaagaactcttggaaatcagaaagggataaagattccagtttgcacatcatttacacaacaggtgattaatgatgtgtaaattaactgtggtactgaatgactgtagctcaatttgcataatgattctaagtgcctaaataaacttaggaatttaatcccattggcttataaatcatataagccaaaaatctgacttagaaaactaagccaataagcctaagtagcccttagtatggcagtataacgaattttaacataaataagtgaatgtagtcgtattttaaaaatgtaaataatcagagtctcagatgagcgtgtttaattaagctgtgaagaacaaatttctggaaggttttgataatgcgatacaagaccaattcacatcaaaatattgcaataaacttgtaatatttaggaaaagaaacatgcaaaatatatacattgtatttggaccgcaagatgcagaaattatataattcacaagtatatactgaacgcgaacatattaatatatataaactgtcaatataccttaaggactaaatcttttccaggccatttataagcagtctcggataacctgcttctttgatgaacttttgatgtcatcatctgcattcatttcacttgatgaataaactagtgaactacttctgcataatttatagcagcacaaatatatggtaaattaccttcgtcaacacaaatgcctgttcaagttgccgaatttggatccattgttctgcaattacaccttccatctgattcaaaaattgtgaaactaacagttgttaagcttttgtgagataggtataaaataaatctagtagcagtgtagcaccaatgaacattaaggtcaatcataacgacgaatggctgctttataagaatgttcagcacttcttatgtgtaagggtagctctttgaaaactaattctagatagctcaactgaaccacatagtttttgctcttcattgttaagacttaaaacaagctacagaagatgatttatatatttttttacaaatatctttattacaccatagcctcttgataagccacaaatgagcactttgaactttacaaaaataagcattaaacatgttattttcctctgtcgaaataattaatacaggtgacatgagtaatgagtcaaagaaaaaaaaattaaaacagtagcattcaaatcctacagagcatgattctgtttatctgatgacgaagaaggataaaataacttaacaaatttccgaccttgtctgaaggaaagtagatattactctattaaagattcaactgatcagttacataatacctttttgacttctgaactcagagattcaacccttttctcagcaccatttgctagggattctattgagtcagcattctcattcatctttctgaccactctccagaggagctgcacctgcacaggaacactgtcaggagtcacatgatgaattttccaattgaagtctgatctcatcatgttcaaaattttggtggagttttgtttgcaacttctgctaatttgcacttgtggaatttagaaaattctaaaaaatatatatatgctgacaagtaatttatacaaaatatgatattatgtgtgtgatacaacaaagacataattttccaatcttctacaagtttttgctcaaatagattagtgtggcatgatctacatttacatttttttcagaagtttctaaattacacaaaaattaatttgcaaatgtccctgggactagctgcaacttcctcataatattttactaatactaaaacattatactgaaaaatatatgtagctttagccagcagaatatagaaacaagtatatatatgtaatatatcatttcaaagatatgattatataatacacccaacaaaagagggaaacccaattatggcatgttatatcatggataataattaataaattattctaaagataaagcgagaggtacctcatcttccaaagctttcacattgctttctgggtaggatttgctttgagatttctacatccagagagtgtaaatattagcatatgcgaggaaagaaattatatgtacatcagcagttggacaaaatttctagaaagatgacaaatagttgaatacatcctactgcagacattttcacaataggagacataaaatcatcagagtaaatgctgaataagtcagttggatgggtcgtgcagtggtggttaaggtcaaacatacacattaagttttaagcaatccccactaacatgtcatctcactaagccattgaatttcaaatattgatagagaacatagaaactgagatcttttaattgtaaaaaagattcataaaaaatagtatatgaagaaaattatccactcatctacagatctactattgcagtgctcatcttatctgctccccaagtccccactaatatagccatagatatttgtttcggtaagaataatatgaccagctaataaacgaagttatacgagaacgatactgtacactcctttttcaaaaaatgtaatgtgtgcatgtagattttaattgatattctacttcctttgcccctatttatcacatcttctcttagctgcattatgatttaatactcataccaattattttctctcatatttcctttgtacttaagtatggaagacatgattatttcctcttcacttttttctggtttcatacccttcttcatctttgttcccatccaaagtaagtcttatattttgaagaggaggaagtacatagttagcaatgatacatccacaccattattcactttattagtcctaaagtggttttctacaaaaaagaattccatgatttttgaagaagagattatgtacagtgcaagtgatgtttattcatctacagcgagatggctaacttgttacagagcaacataacacaagcattcactgatataaccgcataccttggtactctcatatttgttcattaaaatctcaatatcatgttccatagttccaataagattgctgttctcttccaaattgtttgctttactcttcaaagtttttgtgttttcctccaacaaagattctggaacaaaaaatataaattttgtaaaggttgaaggatgatatatttatcaaaattcaaaacaaatgccattggctcaatcagcagtaaagaattccagatgcaattaaactatattgttgacagtgtcaaagaagcttcgtaagttagattttgcaaacagaactagagcataaagggtcaaaaacatattggaaaaccattacatatggtgttgatatgatatgctaccaggtaagctatttcgattcaaaggagaatacaatgtaaatgtgtgaccacgacgcacagccagctgcagaaaggcaacgactccagcacagcagcagcattttcaaccaatcaggatccggtaaattgattctttcatctctagttctctttgttgttaggattagttaactattgcaacgatccagtccatatttactattccattacaatgggtgttaggacactcggtatgtaatgtggttcgatatcattgatcaggaataaagcaaaaggagattaatcaatctaagtattagatccctattggaaatcccagcatctagcctattctctcccctagctagctagtaaataccacccagctatgacaggctgtcctcccggtggtgtttatcccctaaggatccaataacatattaacatcacaggcaggtaacagtctacagttaggcttaattcaactaagtctaggaaagcttaaccggtctcattgtgatagattgaattcaaccacagaatgaaccgacaacgaataattagaaatttgttcgtcaatagcataccgccatgaggatcatgtttatgggtttcaagttttatgaccaaacccaactgcagaagagtaaaagaccaaatcaatggatttggcaagcagttttaaaatcataacactaaccctgcaggtacaaacaaacaaaacaggaactagaatagcataaataactcacaagtacacaaaatagccagaagaatcacaatcattcaggtccttgatccactttttacttcttggtcagattatagaaaactcattgaattgtgattcttatattcatataatgcaaaaaagtacactgccaataaatttaaatgaataacaaattataagtgcaatggaacttgaaacagagttttcaaattctatgttagaaacagttgtacttttaaatccaattattgtggaaacgtttacattacaaacgattaaaactgcaaatagtgttacaaattaaaatattataacttcaggaatagcatataatgtagaaacaatagcataaataatccctgaacctggagtcaatatcgaaagctgaaataagtacaagcattggtcaaataacattgtagttccaattctgaataagtttttttaaaccctattattcagacggtgtgattcaagcaaagtactcgtcgactcgtcgtttacttagtacgcccacgcaagttttcgagcactaatatgtcagtgtacgcacgatgagcacaagacatttcaaatctaagatatggcaagaacaccaaacagcgcgcaagaaacagcactctgccgaggtgggaaaggggagagggccaaagcaagcggtgcctcacccaaatgcagaaccctgagcctgagctcgtcgacctccgaccgcagggcgtcggcggggcgcgactcgatggttgcggacgcggcatgggtggtggcggtgaggagcgcggcgacgacgacgacggcgagcagcgccacctctccggcggagcggcggcggggcgaggggacggagacggagggcgagatgcgtagcccgaagaaggcgaggtggtggtggaggaggaagaggacggcctccgccgcggcggccatggttttagggttttacggcgggcggcgaggggggtggcgggggtttgcgctctccgccgccgcggcggtgtccaaatatgagcgggaggcgacagggggggggggggggggggttgggggagtgggaggtgctggcccgccgcgacgttgactcatgagatgagaaacccatgccctatttgcaatcccgaggatgtcgcgggtataagttttgcataaattttcccagaaagttcaaattctaaatcaaagaagagataaaatgctcgtacattatatgaatatttgtttgactttaatattcatcctactataatttcatatgagttgacttaagcctaaattacaacataagtcactcttggagtctttctctgtgccatcaagtaaacccctctctactcatctagtgcaaaataatatagtcgaccgtttgctctaagagcaggtacaatagtagactataagccggctataaacatattttaatgaggtaaaagaagagatataagagcagcgggctacagatttatagccagctgcagcacagactccaagatgtatgtgtgtataacatctgggacctgacattaattatacagtacatgtttattggtaactattgtatcaactagctattagctaatttggagcccatagttggctgtactattaaacttgctctaattgatatagatagtatgttatttaagcaatagttaatatgttatacgtacaacaaacattcaacacttttttattttttaatcaagctaatctctacttccaagttactagccaccacttcacgttcatattatactacctatgtcccataataattatatttttaggaaattaaagacatattaacagcaaacataatttaccacaataaccctatttaataactatattgtatgcgtatattccatatgtatacttgattaaaaggaatgttaagcgacacaccatatgtaatcttaattaaaaggaaggttgtgggtacacattccatttgttgtgtcccatcttattagaaatacaattttttttgacaaattttgcatgatagaaatacaattattataggacggaggtagtatttttcattccttgttgtgagcaacagatgggtcatggcaggcaaaatacctctacatgcacgtagagccagtgaatacttgaagccggcgacggcgcggtggaagagccgttagcgagggaagagaggatgtggcgctgtgggtggggggcgcggtggcacgatggtcggcgaatcgcgggcatgggcgggttggagattggtggcggcgattatggagtcggactcgggaggggaaggggaacctgcggggtaggaagaggttggaggtgggatgaatctcaagcattggatttaatatggacaatttgaaccattgcattgagtgatgaatgaaagatagataaatagatagataggcatagagaaaattcctatatacccttaaaaatttactcaatccctttaatacccctgaatttgacctcatcccttatatacccctgagttttcattttgatcttctctatacccatctccgttagttaaccattagttgaccgttaaatattttaaaatgactatattacccatcctatacatatgtggtacctacccaataaattttcatatgaaaaaattaacttatacaaaatacaagcaatataatcatttgatgcccaacttaaaaaataaaacttattattttttattatttttaaaaaaatgattaaatacatacattagtttcaccagaaaattaagagcaaaaactaaatgttatttaggtttaattttttgggaagatatacgaaattcatcaaatttgatctgaaatttatttaaaaattttaaatttgttttctaatttgtgataaactaattacatcccctttgtttttttacaacgaatcttttttcactaaatatttgttgaaaagtaattttcaaattttatgcagaactttttttacaataaatcttttttattttcatgaaataatgttttgtttttaaaaattcataacaaatatttagtaacttattccttattggttttcacaactcaaataatttacacataaaacatttctagcttttaacaatataccaaggacaataaagtaatttcttcaataactaacggtcaaactaatggtcaactaacggaatgggtatttaagggatgcaaataaaaactcaggggtatataagagatcaaacaaatttatggggcgtagaagggattgggtgaaattacaggggcatgtaggtaattggcccataggcatatgcttgtggttatagggcttgtttggttctttaccctaccaattcattggtagtgccaaagtctaggaaaattttggcactaccaaaatattggtagggtaaaattatttagctaacatttggattgctaccaatttaaagccaaattcttatagcatagtgaagaaacttctagaatatgaccaaatattttaggggcactaccaaatatttagtctcaatccaaactaacacacaaactattcaatttgccaataaattggtagggtatgtttttggcatcaaaccaaaacggcccatagttttgtcaaggtctaagatatagaataagtttagtaaaaggggtaaagtgtaaaaattcctgccaccccaatccttctcccggccgtacaccatttcgttccgacgcgagtaattcctccccacgggcggcgactagggcggctagggttcgtcgggcgccgccgtgccggagatcgcctctcgccgccgacacccggatctccgccgccgccggtcgccccaggttatcccgctcccgcagtcaccatcccgtcttctccgccagtcgcctcacgcccggcctggacgccccggaatccattgtcggtctcgccccgccgactgccgttgacgccactggctgaaggtaataagccgctcacctctccctctccccctccccctgcgagctcatggatttaatccattcgctcgtgcgtgttctccgtacttgggtgaactaaacctagttcgtgttctccctacttaggtggagtaaaatagttgaacgtttgttctctgtacaacaactgtcacctatcttctcatttaggagcttcgatttatcctagaatgaacggaaccagcggttttggatgagttcagtactgtggtactcttgttctcgtggacgatttagaggagccactcctgttgagaagaattatatttcatagttccccgatggtaatgaatcactagagcccgtattttgctagtatatattgattaacttccacaaatgtgaaggataatcatggtgcatagtttttgtatgtcaagttttctcaatcaggtggcagctgtattgcttgctagtaaaaatgttgtgctgattggttgtttttaaaggcgatacgcagattggttgcttttcttagatgaaattctgattggttgctagacaagcagtttgcccttcaaatgctatggcccacctgcaaacgccctagagtgctttggtgctctaatctaaatgacctaggaaaggattaggatgctgttgcttaagttgtttgggctgcaatggatacaagttagttagggctggaaatgatgatctccattttcagaacatataaggctgggaatgggccttggcctgtcaccaggccttcaaatggagaatagacaaactatgtcgacttattagttgtgttttctcttgctcttcttttgtctgtaagtgttgggtgttctatttgtttttatacggaattaattgcacgcaaaaaaccgagtgctcacttctgcaacgttctaatggttgcgaccttgggtcgttctcccggtggactcgtaccacaaaatccgcaactgccgctgcacattaatcacttcctccttgatttttcaattttaaaattgaggcccccccacccccgcaaacgccaatcagatggatcggaattccttaattattgccgaattattatggaatcctatgggttgtttgtcgtacaaagccctttggaaacttcattttgctcagcggaggacatgtgctggttagttacatatggaattataagcaggaaatcagctgcattttgcattctcgttagtaagattttctttttatataaaaaagaacccatattaggaccgttatctcgttctcaccccacagattgcgtatcttctgcttcttcttcttcttttttttgctaaactgtgaaatcatcgagaaaatcccaaatttttaatatcatttttacagtttaagcttcaaaacctccaataacatgaatataaatgtttatccataagatttttttgttagttcatttgtttttttgtcgccttatcaatgatagttcaaatgattagagcttagcaatccttttttcaatttatactctcattttccacgtgtttcccgaattgctaaacggtgtaattttcttttaaaaatgttccacaggaatgctactttaaaattatattattttttattttagttaataattacttaatcatgcgcaaataagatacatcgttttttttcgggagaaatgggctagcagcaatgttgcaagctactacatccgttttagattataagctattttgactttgatcaaaattaatctactctaagtttaatcaagtttatacataaatatactaatatctacaacactaaattagtttcattaagcttataattgaatatattattatagtatatttgtattgcgttgaatatgtgactacttttctaaatttaatcaaatttgaaacaattttactttaatcaaagtcaaaatgacatataatctaaaatagagtgagtatctctgtagggtgtgtttggataataggaaatagggagtgagattgggattgaaaattgaatgaagagttaggattaaatgaaagagagagaataaatggttaggatttaaatatgtttttagtaggtgggaaatcatttccatatcctattagccaaacactggcctaagctaataccaacattcttcaggagctggatgcaaatttggcagaccaagtccaaaacacgacagccagcagcagcagcaggacaccaacgcgacgccaccacagtataactcgacgcccccactcgctctcttccccaacccaatgacagcatcagtattccagtagcagcggagagagagagggagcggccaaccaaaagcccaagccaagccaacgccgcgtcgcgtctcagccagccagcgaactgcctccccgcccccgcgcttgccggcgaactccccccacctccggcggcccggccccgcctcgctccccggcatcaggcgatcccccccatccccttccccgccccctcccctccccgcgcgcagcattcgcagatcgcatctggctcgctggccgcccgggccctgctctcgcttcgcgtgtgatgtgatgtgatgtgatctcttccccccatctctcgcggcgggattttctgggggattttgtttttttttttttgtttgttcttctcgggatttatgggggttggatgggatgagatctcgctgccggacttagggatggagtacagctgaaatggcgccgtcggtgtagtgtgtgtgtgtgtgtggacagcgtgcggcggtgtgggggtagttgtgaattagcggtggtcgtggcggcggatttggaggggagatctagcccccgctcggtgcttcctaggtttgttttcctaggtcgtggacggaattgaggaggtactgattcggatgagggtgtcggtagaatacggcgttccggacgacttgctggttgctgcttgttgtttcgggttgttgagttgactgtagctgagttgctgatccagttcgttgtgaattatgcgctaatgcagtggtacttctccatgatgatgattttgcctttttgtttccccttattattacatgattcctcagtacaaatgagcaatcattcgctttgtttgctttggagtatggatattagtggcggtttaattattgtggtacacagtggtggaaggattgcagagttatatatatacctggtggaatttggattaacgagagctcaataacaaccacattgtggttgatttggtcacctatagtttcctatgagcatctgagggctgactaattgctggactttagaaattagaatagctgttgttgcttattgtatttacattgctgttgttatattgttcctatatggatttgtaggctacagctgtaccatattttaattgaaaatgctccaattacttgtcagatatgattcactagctgcatatgaaactttaggagaggtctgagttgtacatggccttatttttctacaatttctctgcacaggtgtgaatatgtcggacagtgcgttgaaagatctgaatctagctcagtgctgggacttcacctggtgactctccctctccctctccctctccctctccttccgaatggtgacgatttgcgcggtcatattttttttcaacgattcgtgccttctcgatgagcaattttggatgatatttctcctaccggagtgcatatgctgctgtggtgctgtgctatccccgtgttgctttcacctgcgctcgtggtgttcgacgaattgcctaaaagaagcatttgctactgtttatgctttctttggctaggcggcggtttcatttcagtttccctgcctatcaatgtgttgcgcatacttccttatacctttttttttacccccaaattcatgcaaatttgagacctattgatactatgatacatagtatagggcaatgactgctattttcgaagcattttgaactgaatcggtgggaatacctgattattttcatggagtaaatatcctgtcgtaattggtaaagctattattttgcgagggtacgcaaagctttgttctcaatgtaaagccacgaactgatggatcattaaataaaccacttccattggcgacatttagtttcttaagagttaagactggaagccagaaattctgtaataatttatcgtagtgttcagagttcagacaacacagaagaaatgaaagtgtgcagcatctgttaggaagttacaatgatgtcccactgacgcacaagcaaatttgctgggttatggaaattagagcagaatagtgattttatcgtttgaccatatagtgttattaaatgatgtattttcatgagcgaatgatcaatgccaaaaaaaaaatagcttaaaaacttgtggcgaatggctgtttcatggctatagtctcacaaacccagccttgcagaaaactcttggagctagtagtaatcaacttgatatatgttgcttttatgcatactgaatcatctgctacctttaatcatcctgttcctcagacattgctacttacgcatagtattgcatcaactatgtagctcatatgtagagaaaatttatcttgcactaacaacctttttgtatggcagtgactttgaaattgattatggatccgaggaacgcgcatccatagtttacaaaacgctagctgttgataaggaggtaagaagttatagtacactttaacatggttcttgttttcataaggagtcccaatgtttcctcttttcttcatgctagcttgttgagaaaagaactcgaatcctgtggtatttatcttgcagttgcaacctgacaaggtaaagagggagatgtctgtttctggtggcaagctcgtcgtgtcagtaaatccattcttaacaattgctatcgattgtgtttactttgattcacgatgtgtactgatacaaaattttctgaatctaattcaggcactttgaagctgtagaggctcggttcctgcgagcatcgttcagcgcgttcgtcgatcttacagtactggttaccaagcttgttgaagaatatggcatcagcaaggaaggagaaggcagtatctagctagttttactcccctgtatcttagaaaaatgttttacaacacctttgagcattcataccttcttttatatcatattatgtgtgttcttcgtttcttaggccagaaatctacaagatagaagcagctgttgtaattccagatttcttgaatcttggtatgggatttgcctctcaagagtaactctgaacatacttggttgggatagtagtcagttcttgtcgccttaaatgaaaaatcatgcatgtatagctcactgtattatataacctgataatgatgatgatgaatcgtaaaaaatggacggaaatccaagaatgcttcgtaaatatatgtagctgaaaataaattgactcggataaagctaggaaaaaacagaaacaaagtctcccctcattaattaatttagtaggaagagaagatgacaagagtgctatctcattgatagaaaaatagaattggcggaatattactccctccttccctaaatatttttgatgccgttgatttttttaaacatgtttgataattcgtcctattaaaaaatttaagtaattattaattctttttctatcatttgattcattattaaatatactactactatagtttttaataagacgaacggtcaaacatatttaaaaaaaaatcaacggcgttaaatatttagggacggagagagtattacccaacaatacaattaaacacgacgtacgcacgatcattagactcaatttaaattacgacaatacaattagccagtctctcatagccgaccgatcagctaagcgacatacacgcgtacatgcaactaaatttaaattacgacacacacaaaacctagacacacagcaaactaaatttaaattgcgacacacacacagaaacgaaccttagctagctctctccaacctcactaaattgaacatgacacgaacacacacaattagtacagctacatagtactacgctactactcctatatgggacacaggtgcatgcgtggcacggatcgatcacactagaaaatgatcgaactacgaacgtcggcctgcaggaggtatcttcctgggcggcgtagcgtccctggggctgtccgacttgatggagcacagctcgtccgaatcctcgccatctgaagtccgagttatgatcaagtcgtctatgtccagatacatcggtggcagatctgcaaagtttattaattttacagcaattaatgcatgcaataatcaagtaagcaattgaagctatggcaataatgcaagaaatcaagaatcaagaagaagaagaagaagaagaaagctagaagttatataccgtgtttctccctctctcgttgtgtttcactcacgctctgctgcttctgggatgatgaggatccctgactttgctcaccttcacctccatgctgctccccggtgcccttctttctaccagacttgagagctaccctgtgggccgctagatttcctgtaggttccacagccaactcacaggaatattaattttcttgacggggttacttatacccacagaaaaattgtgttatttttgtaggttttcacacagacccacagaaaaatagcgctgacaagtaggcctcaagaaccatcaaataaaactcaggcagccaagtcccaaaacctaattccccacccctcttcccaaaccctcgagccgtcgccgcccctctattctctccagatccgcatggcgagcgcctgtgcgataccttcgacgaacggcgggtcggctaccgagcctccgcccagcgccatcggcaagatgcagccgaccatcaccaccatctcctgccggcgacgagcttccaccatcccctccactgccggtgctagccaccccaaggcccaagctcagaacctctagatctggatgccccaaccctgggaaccacggatccagccgtatcgagtgtgggtgctccagatctcgcggttctcggctccggcagcgccggcaggagaatgggcgctgcccctccttcccctcctcttcagtaagtaaaagcatccaaaaatatgtgtttcaatggtgaggaaacggtttggagcacctctgtccatgctagcatgtgtttccgctgctaatcccaaacaccgatttgttcagatagccgccggcggagatttctaggagttcaatttaatctgctccaaagttgcagccaaccattctccttcaggatgaaaaagtgtaagtcatactagtttacacttgtggattattttggctttgatccgtattacgtgactgcccagtagtagatctagattgggttattggcccttgaccacaagtttaatgattgtcagtggaatgtcagtagatctagattgggttcttgtgtcaaaacctgcgttgctgcattcatcaactaatctagattggattagttgatccattactgttgttgccaattattattttttctcagagctctgattcccagatattaagcaagacaagttggttcccatattgtctacattatgtgatttagtttctataatagaaatttaattttcttggattacttactcctagagtataatatttattttacatctaaatgatttgtttcttgtttcagccttgtaagacaattatgtctggaccaactaattttcctctagccattttgtgaagacctaatgttgtggcatgacagattgacaggtactcccacactagagtccctgctattcataaaactttgtttgtgtctggtactgagttgtttgacatggaattaatctatcagtggattatcatgcactatgctttcttggtcacatttagttagaatgcagatgcttttcttatgctatttttaccttgcaattcatggtaaggattgtgtgaataatgagtattatagtgttttattttctctgttttagtagctaagaaaacatatttttagctcaggttgtatgcatgaaatcattagtgctttctagtctctactagtgcatatacatacttcacaagtccaagtccatgtatatcttttggcaagtcacatactgctacatgtgttggatagatacatgccatcagaacaataaattagtttcagtctcttgtttttaaaattttcttatgtacaaaccctttataatttaccttgttcatggcactttgtatttttcttaacaggccatagcttgaatctttaagtgctgcagttaaatatctacagaacgttgcacatgatgaaaatcaaggtatgcttctcattcagtggatgaaatctttcttagtctaagatgtcctagcatttgcaccatgaaacttgtcatttaagcatccatagaaaatgagtttgatcctattatcctagcatttatgtcttatctgaattggcagagtactacaggaagtattttcatggtcacttttcatttcagttgccatatttcattttcatgctttgtagttgacaaatttatgttgctcacttcagtttttcctgtactaatctatttgtttctctataactggggtattcagaatcattgttatttattttgtaatgaagaaaattatgaaattgaacctcttttttaaaaccttttagcttcctttgcccaaggttgaagcaccacggaacacggactgctgctggaagacaatgttcttttacatatgtttgatgaattgtaactgaacacatttatcttttctatggaccctttgtatattactaaatccggtttgaatgaatttgtatgtactgaacttagatggactatttatgtaagctttgcagacttgaattttgatgtatggattgtgattgatgttcatatatttatccaaatcaccatgtgtttttttttgggcgtggaactcattttttctgacggtggatgatggtttttcctgacgggtccacgtcaaaaataagctttcacaaacctgacgccagttgattttttttgtgagccaaccgacaggaattcccgacagaaatgatatttctgtcaggaaaacgacagaaaaatttattttctccgtggtcttttttctgtcggcaaactctgacggtgcacccacagaaaagtattttctgacggtaattcatattattctgacggttttcggcctacagggtagacctcttgatcttctttttcttctcatcatcctccttcttgtcttccgacgactgtggctgctcagcacggttcttctgcctgtccattggagcttaatttgctagctaactaataactatagctaatagctaggcgctggctaactcgatcgaaaagagctgcttatcccacagcttgtctgcaggttgcgatgacctatatttatagtcagtgtacatcgatcattgaattgatctttgttcatgcttacctttaatttgcttctgacttgctgcattatatataatccaggtcttgagatgaccagatcagtgcggcgcatggatgtgtcaaaagagatcactgaacaagtatagtacatgcacgtgaactagctagctactgtaaaatggatcggagtacattgcgacagagagcacatacgtactgtgaaacaaattaaacatcataatctaattcttgcacttaaatgtccaaatgctagtttctcgcaatctctggttgtagcagaaagagccttaattttggatcttaagagctgctattattacttgatgacgagaagtctctgtactttaattagccgtgcatccaaccaaagagtgcctccatgctggttctcatttcggtttagaagaaaacggagacggcccagcaaaccaaaacgacccatctgtgagcatttaatttgcatgtgtacgccttacgcatttcttcgctaaaaaaatagttaaaatttttcgggcttggttttgtatatatatctctctccctgcccaagctcgtccaataactatcgtgggccttttttttttttggccagacttcttcggccccggggaggcaagcctagggacaatgcatatttataaatgaacaataatccaaatgatttaagttatttatatatattattatacggttggtcagtgttggagaaatttattacttctttccaaaacaaattaaccaaatataaaatgtttaaattcataatattatgatgtatcgcatctcatatttaattggtttattgtaagatagagggaatactattaggtacgcttgatcatgtggtgtgtgccttgcattcatatgaatactactctcttcgtcccttaatataagagattttgacattttagttacactgtttgactacgtcttatttaaaaaatttgtgcaaatataaaaagcgaaaagttgtgcttaaagtactttggataataaaataagtcacaaataaattaaataataattccaaaatttttttgaataggacaaatggtcaaacagtgtaagcaaaatatcaaaatcccttatattaagggacggagagaatagtattcatatcaaatggaccaaatacaggcagctgatagatatagggatatgctacacaaagacaagctcaatgtttgtgtggtgtgatgtaatcttaggagtgagcccataaatagtgggataatgttaaagcaattcgcacaatgctattgctatggctaggatttaagtaaccataagatagggccacatgagatagaaaaaaaaatacttcagctcttgtttatgaggtgaatgagagagataaaaatattttaattttgtttgtgatagaccttaagtataatgtgcaccataaactaatgctacttaccacaatatatgtgacttattttataagtgtaattattattttaagattatatttttcataaattattattgttgtgctaacgccatatcgatcaaaaaaagtgagcagaggggaatatgcatgatatatagcatatcacgggtatgattttgactgctagctgctgctgtatggtactacctccgtcccatataaattataattctagatggttgcatatattaaggattgagaaaaaaaactataatcgatgctccttattaaatgttctatatatagataaaagtggaggggtagttgagggtaaaatagagataaatttgaatgagaagtgattaatgagaccattaatactatattgtgataattattttgggacaaatttaaatcctagaaatataactattataggacagatagtaactagcactctttttaaaactaattaatatgggtgttaaatgctgcgtgcatcttggaatgcgttatatataggagtatactactagtagcttgtgtgcctataaatataatcgtatgtcatatttaaccatattaattgtgatatatattatcacgattgcatgcatggtcaatataattcttttatttattaattaatgtaagagtttctggcatttagagtaaacgcgatgttacctttattttactatgtttataatatatatagtccagtatatatatgtgatacattggttgacaaacttagtattacttaaaaaaagatgacatcaatagcagtttatttcacgtacggtagatcaatgcggcgtacgttgctagacaaaactagtgcgtaaaaagtttcgagcacacgcagtcataataatgcagtaatgcagatgaccaaggtgaatggggtagtgcatgcatatatacacttggtcaactctgtcgtatacagtagtagacatgtaaagtactaaactttattcggtctcgtcatcgatatatcgtcatactactttactgtagttcatcagctctgcatttgcatatgcatgcagatatgattcgacgaccaaaattaattaaggctgtgtttaatccaaagtttgatccaaacttcagttattttttatcacatcaacctgctataaacacaacttttcagtcatatcatctccaattttaaccaaaattcaaactttgcgctgaactaaacacagcctaaggtgatgtcaaccacacgacgaagacgcgcgatatgaagcggtccttgttgggataagacgtactacgagcgatccttttggacctcatggtcagtactccgcatatccgtactgacgattatattgctggatggagcggcttgttgcatttcatttccagtagatatagattaattgtttatttctttattttttcttaaaaatccagttaattagattgcacagatggttttatatatgatcttcattttggacgtcaacgaaattacaggagagtgaatcgtgttagcctagataaagtatggttgggctagtttgcccatataaatatagtttccgtttggtccactatgaactctgcttgtctacctaccccaccaccaccacccttttctctcccttggtgaataatccaacattttttttcgcgaaatacattacagacggagacactcatatatacaaacgtgcgcatgtaccctatatatctctatgaaatatacaaaaatgccaataaggagtacatgacataaaaattgcaaattagctccatcagcatagactacgaccttcttttttgaaagtcatggggatacgcaaatgcaaagcattcgagtggctagttatctactccctccttccctaaatgtttgacgccgttgacttttttaaacatgcttgaccgttcgtcttattcaaaaacttttatgaaatatgtaaaactatatgtatacataaagtatatttaacagtgaatcaaatgatagaaaaagaattaataattacttaaattttttgaataagacgaacggtcaaatatgtttaaaaaagtcaacggcgttaaacatttagggatggagggagtaatatagaatttggacggaggacacataaactactattgccctctctgcaaatataccttcgaaacttacttccatctccacacgaaaggcagatacacaagtatctggaacatattagcaacttggatcggctgcgaggagggacttctgaaaggttacaaatacggtgcacaagtacgtggagtgcccacctaaaggtcctgtctagacctatgatggtgaggcgaagactgaggcacagttacacgctgttctattgtgagcatgaatgggatgatgttgcgtgccgggcggctggcttgggtcgctgtgtgtcaacctcgaacgacccaataaatagtggaacccgattagagcaaggataatagtgagatatgcttatgtggaggagagagaaaaaaaggtgttggctctcatgcaagagctagctttgcacgtgctccaagacaaatacattaaatgtataaatgagagaaaaagataggagaagaaaaatcaaagataatcttagagctagctctgcacgtgctgtttttcggaaaaacccctttattttttatctttatagcgctacctctagaagcggaattttcttttcttcgcattgtatttctgtgaaataggagggctttttcagaacaaacacaacagggtgttgtccagtttgaggacatatgcgatattttgtgcaaatacgaggagtttttttttttttgcaaaatagccttttaatgaaaccggctccaacccacggtgcagacccatagcgcctaaaattgcgtttggccggttaccgcctacaagcggtcactcgtgcgcgcgcgaggagccaactacagcaaatgggcgacgtgtaaatttacgggatagctaaaaaataaaaaacatgagaaaaagggtacggttaggctggttattgattgatgataccccatctaccatggggcatagagagaaacaaccaagcaagtggttgtgccggctcaggtacgcacggagtccagcattgagacctcatacatctacaacagttggtatatataagcagtagatggaaatacattgaaatccctaagttaaggagctgcaaagacagatgaagtagcactgcaaaacaaatgtccctcttaggaggatgaaatggactacataaacacgagtttcttagtgcccaaatatatcaaccacaaagttctgtaattgagcatagctgcccctgattttagatatgcagaccacagtgaatgattttcttacaagttccaagctaagatcattctacagttaaactcatgatctcaccataatacgctgggttttctctgggttgacaaatacactgattatattcatgaaaatcattaagcagtgcaatactacctacatgactcagcgacacacagaaggcaacgacggacgaagttatggcagaaacactcttaattttgtaagtgtttttgtatttggaagatcaacaaatcttcttttggatagggaaggtcaacaaatcatttgctcaagcttaatgttctcgcaatatcttctcattgtaagtgataaaacgaaacctgttagaaacttccgtttgaaagaacatgttattgaccctaaggaaagaatgtggtattgaagcattccaatcaacacaataagttattaaacagttgctatgatcacaaaaatgttcgttcttttagaaatcaaggtacaaaggaaaatatctggtttcatgttggagacatggcagcatctgattcatattcatgcggataaatcagttatcacatcttctgattatgtagagcttgtttttatacactcaacaagctgcaaccaaatgtcagttcgaccaaagtgttctgctcacatttcctaattaagtatgtccctgtttcagctaatatataaaagagcactctataaagcaaccaacctcatcctcagtttttgtgatttctgaaatttgcttctttcctctaagaagcggctaagttcaatccctaagattgaaccagattatcaaatgagagacacgccaagatgtgttagctgctcgatttacacggtttctctagaatttatgttagccgtacaaaagaaaattaaccagttgtattagcactatcagttgtattatcactgtgtaattaagtacacctctgaaaacctggcgaattttgtttcacatttacctgcccctgcagagaattgtggtgttgagattgcttgaagtaggtcgaggtaagtaattatctgaaacatgaataatagcacgtacagttttgcatcaatttagggttgaattaacattacgatcaagagctggtggcggaagtagggccaccaggggcgtaaccgccactctgtgctgcaaggacggagcgacgtacgcatggcgagatgaggcgaggtggttggcaaagaagacgcggcgttgattgaaccgctccttgccggccgtccaagtggtgaaaggcggacggcggaggtcggcgcgaggaccagcagattcaagtgcaggtttagcatcgacggcagatcaaccggtggccggcaattgagcggggtgcgggagtggaggcaatccagccgggttcactcgacgataatgacttgaagccggcgacggcgcggtggaagagccgttagcgagggaagagaggatgtggcgctgcgggtggggggcgcggtggcacgatggtcggcgaatcgcgggcatgggcgggttggagattggtggcggcgattatggagtcggactcgggaggggaaggggaacctgcggggtaggaagaggttggaggtgggatgaatctcaagcattggatttaatatggacaatttgaaccattgcattgagtgatgaatgaaagatagataaatagatagataggcatagagaaaattcctatatacccttaaaaatttactcaatccctttaatacccctgaatttgacctcatcccttatatacccctgagttttcattttgatcttctctatacccatctccgttagttaaccattagttgaccgttaaatattttaaaatgactatattacccatcctatacatatgtggtacctacccaataaattttcatatgaaaaaattaacttatacaaaatacaagcaatataatcatttgatgcccaacttaaaaaataaaacttattattttttattattttttaaaaaatgattaaatccatacattagtttcaccagaaaattaagagcaaaaactaaatgttatttaggtttaaatttttgggaagatatacgaaattcatcaaatttgatctgaaatttatttaaaaattttaaatttgttttctaatttgtgataaactaattacatcccctttgtttttttacaacgaatctttttttactaaatatttgttgaaaagtaattttcaaattttatgcagaactttttttacaataaatcttttttattttcatgaaataatgttttgtttttaaaaattcataacaaatatttagtaacttattccttattggttttcacaactcaaataatttacacataaaacatttctagcttttaacaatataccaaggacaataaagtaatttcttcaataactaacggtcaaactaatggtcaactaacggaatgggtatttaagggatgcaaataaaaacttaggggtatataagagattaaacaaatttatggggcgtagaagggattgggtgaaattacaggggcatgtaggtaattggcccataggcatatgcttgtggttatagggcttgtttggttctttaccctaccaattcattggtagtgccaaagtctagaaaaattttggcactaccaaaatattggtagggtaaaattatttagctaacatttggattgctaccaatttaaagccaaatttttatagcatagtgaagaaacttctagaatatgaccaaatattttaggggcactaccaaatatttagtctcaatccaaactaacacacaaactattcaatttgccaataaattggtagggtatgtttttggcatcaaaccaaaacggcccatagttttgtcaaggtctaagatatagaataagtttagtaaaaggggtaaagtgtaaaaattcctgccaccccaatccttctcccggccgtacaccatttcgttccgacgcgagtaattcctccccacgggcggcgactagggcggctagggttcgtcgggcgccgccgtgccggagatcgcctctcgccgccgacacccggatctccgccgccgccggtcgccccaggttatcccgctcccgcagtcaccatcccgtcttctccgccagtcgcctcacgcccggcctggacgccccggaatccattgtcggtctcgccccgccgactgccgttgacgccactggctgaaggtaataagccgctcacctctccctctccccctccccctgcgagctcatggatttaatccattcgctcgtgcgtgttctccgtacttgggtgaactaaacctagttcgtgttctccctacttaggtggagtaaaatagttgaacgtttgttctctgtacaacaactgtcacctatcttctcatttaggagcttcgatttatcctagaatgaacggaaccagcggttttggatgagttcagtactgtggtactcttgttctcgtggacgatttagaggagccactcctgttgagaagaattatatttcatagttccccgatggtaatgaatcactagagcccgtattttgctagtatatattgattaacttccacaaatgtgaaggataatcatggtgcatagtttttgtatgtcaagttttctcaatcaggtggcagctgtattgcttgctagtaaaaatgttgtgctgattggttgtttttaaaggcgatacgcagattggttgcttttcttagatgaaattctgattggttgctagacaagcagtttgcccttcaaatgctatggcccacctgcaaacgccctagagtgctttggtgctctaatctaaatgacctaggaaaggattaggatgctgttgcttaagttgtttgggctgcaatggatacaagttagttagggctggaaatgatgatctccattttcagaacatataaggctgggaatgggccttggcctgtcaccaggccttcaaatggagaatagacaaactatgtcgacttattagttgtgttttctcttgctcttcttttgtctgtaagtgttgggtgttctatttgtttttatacggaattaattgcacgcaaaaaaccgagtgctcacttctgcaacgttctaatggttgcgaccttgggtcgttctcccggtggacttgtaccacaaaatccgcaactgccgctgcacattaatcacttcctccttgatttttcaattttaaaattgaggcccccccacccccgcaaacgccaatcagatggatcggaattccttaattattgccgaattattatggaatcctatgggttgtttgtcgtacaaagccctttggaaacttcattttgctcagcggaggacatgtgctggttagttacatatggaattataagcaggaaatcagctgcattttgcattctcgttagtaagattttctttttatataaaaaagaacccatattaggaccgttatctcgttctcaccccacagattgcgtatcttctgcttcttcttcttcttttttttgctaaactgtgaaatcatcgagaaaatcccaaatttttaatatcatttttacagtttaagcttcaaaacctccaataacatgaatataaatgtttatccataagatttttttgttagttcatttgtttttttgtcgccttatcaatgatagttcaaatgattagagcttagcaatccttttttcaatttatactctcattttccacgtgtttcccgaattgctaaacggtgtaattttcttttaaaaatgttccacaggaatgctactttaaaattatattattttttattttagttaataattacttaatcatgcgcaaataagatacatcgttttttttcgggagaaatgggttagcagcaatgttgcaagctactacatccgttttagattataagctattttgactttgatcaaaattaatctactctaagtttaatcaagtttatacataaatatactaatatctacaacactaaattagtttcattaagcttataattgaatatattattatagtatatttgtattgcgttgaatatgtgactacttttctaaatttaatcaaatttgaaacaattttactttaatcaaagtcaaaatgacatataatctaaaatagagtgagtatctctgtagggtgtgtttggataataggaaatagggagtgagattgggattgaaaattgaatgaagagttaggattaaatgaaagagagagaataaatggttaggatttaaatatgtttttagtaggtgggaaatcatttccatatcctattagccaaacactggcctaagctaataccaacattcttcaggagctggatgcaaatttggcagaccaagtccaaaacacgacagccagcagcagcagcaggacaccaacgcgacgccaccacagtataactcgacgcccccactcgctctctcccccaacccaatgacagcatcagtattccagtagcagcggagagagagagggagcggccaaccaaaagcccaagccaagccaacgccgcgtcgcgtctcagccagccagcgaactgcctccccgcccccgcgcttgccggcgaactccccccacctccggcggcccggccccgcctcgctccccggcatcaggcgatcccccccatccccttccccgccccctcccctccccgcgcgcagcattcgcagatcgcatctggctcgctggccgcccgggccctgctctcgcttcgcgtgtgatgtgatgtgatgtgatgtgatctcttccccccatctctcgcggcgggattttctgggggattttgttttttttttttttttgttttttcttctcgggatttatgggggttggatgggatgagatctcgctgccggacttagggatggagtacagctgaaatggcgccgtcggtgtagtgtgtgtgtgtgtgtggacagcgtgcggcggtgtgggggtagttgtgaattagcggtggtcgtggcggcggatttggaggggagatctagcccccgctcggtgcttcctaggtttgttttcctaggtcgtggacggaattgaggaggtactgattcggatgagggtgtcggtagaatacggcgttccggacgacttgctggttgctgcttgttgtttcgggttgttgagttgactgtagctgagttgctgatccagttcgttgtgaattatgcgctaatgcagtggtacttctccatgatgatgattttgcctttttgtttccccttactattacatgattcctcagtacaaatgagcaatcattcgctttgtttgctttggagtatggatattagtggcggtttaattattgtggtacacagtggtggaaggattgcagagttatatatatacctggtggaatttggattaacgagagctcaataacaaccacattgtggttgatttggtcacctatagtttcctatgagcatctgagggctgactaattgctggactttagaaattagaatagctgttgttgcttattgtatttacattgctgttgttatattgttcctatatggatttgtaggctacagctgtaccatattttaattgaaaatgctccaattacttgtcagatatgattcactagctgcatatgaaactttaggagaggtctgagttgtacatggccttatttttctacaatttctctgcacaggtgtgaatatgtcggacagtgcgttgaaagatctgaatctagctcagtcagcagagctggagaaaaccaaggacagttctgccaagtcttgcatcaccaagcctgtcttgaatggcaacaaatgcaacaatacggaagaaaatgctccacctgtactccctgatgctgtgactaatgggtgtgaagctggaaatgcagatgttgagtatattgattctgagagtctgacagatcttgaagatgctggtgcaacccttagtgtatgccaccagatgtttatattcatgatcttttttgtgcttggcatttttctgattggaccagccctaacatttgatcatttcttactgcttgatagactttagttgcaaggttggattcaaaagactgggttatgacatgtgaagctctaaataatgttcgtcagttggcaatatttcacaaggatagattgcaggaacttctgtaagttgcttaccttgttattcaatcaaaaggatctttgtttttgggcaaatgttacttatccatgcctgaagctatagaattacatcattctctgtatcttaatttttggatttgaattatagggaacctctagttcctcttatcatgaaatctgtctgaagaaattcattctgttttttttattggacccagttttattctcttcgattgcttgtatctcaaaacactcaagaatccaaggagcgctgcctgtaaagctgcactcatgacctgttctaatcttaatttttggatttgaattacagagagcctctagttcctcttattgtgaaatctgtcaagaatccaaggagtgctgtctgtaaaaccgcactcatgacctgcgctgatattttcaaggcatacggtgacctaatggttgactcaattgatccactggtgtgtgtttctcagttctcaaacttccattcacaattacactagttctttttcctgtactaactacgctatttctcaaaacatcttttctgccaaatttgttctcagttagtgcagctatttctgaaatcttcacaagataagcgttttgtctgtgaagctgctgaggcagccctcatatcgatgacaagctggatcgccccttctgctctgttaccaaaaatgcaaccttaccttaagaacaggaatccacgaattcgagcaaaagcatcaatgtgcttcagcaagagcgtcccacgcttggtaagtgaaaatctcacctgaaatttattttaagctaaccgcttttgttttgcctcaactgttatctgattatctcctaattaacctaggagaggccaaagacaaactcaacataggatttagctctcttttctcacattacaagtactcaatgaatatcttaattcgtggtcttgttggttggcttagagttaacacgcagttttctcgaccttttttagtctatttagatatgcagatgcgggatgaggtttctgtattataagacagacctgtagcttttccaaaactatgggctagtgtgtttggtagagattctatatgccgagaataattagctgacaaatgatttttacctgtggccttttacttcgaggaacttcatctaccctaaattgcctggccattattagtagtgtgacggtatctggaatttttttttcttaattggcttttatgtagtttgtatatcaatggttccatgctctaaccaatgctgataacatcagttttagatgttttacttaaattgacctattttgtttccagggtgtggagggaattaaagaatatggaatggataagcttgttcagatcgcagcaactcagcttagtgaccagcttcctgaatccagggaggctgctcgcaagctggctttggagctacaagcattctatgagaaatcccaagcttcgagttctggtgaagttgacgacgcacctgctacctcacctgatgctgatgctgatgctggtgctgaatcatgggaagctttctgccaatcaaagctttccccattaagtgcacaggcaatccttcgtgtcacctctacgacgaaagagggtgtggctgtgggtgtcacctctacccctccgaaagaaggcgtcactgttggttgctagcatcaggaggtagtagatgcaatgaggttgtggtttttccatccgattcaccttttgctgtacatggttatggttgttctttctctacatccaatctgggattcgttcgttaagcatcggttcgagagttgaggtgtgacctgtgggtgttaatattggtgcgagatatacctgttatagttgactgtatgatcttccttttctcccactgcttggtattgattggtcaggcgaattgtagaatttcttccactattcaatattactacacagtaatttttccatctcgtggccttgtgtttatttgctggtgttcactatttcgtgtttttgaattctaacttcttccattattcaatattatcgaatcaattctcatcagtgctttcttccactggtttctattttactgaaatttttatgctgttctatgagcaagaaataactaactgggctcaaccaactggtactccaaagaactgtgacttgtgaagtttgatcactgtacagttgtacatatgtcacagactcatagtacacgttaaacatcagagaaccccagattatcacagctgcacgaagattaagatgatcatgtatgcatgcgtcgccggcaacacattctgtgcacagagaaaaacttggacaagaacatgccaacagctagcccatcagccggcgatcaccgccggcgaccggccttgccgcaccggacgctcagccaacgatcatcggcggcggcgtcgccggagcaaccagcatgaggtgcgccgccgggtgcagcctgaacaccaggccgccggcgcacccgaccgtcctctcctcggccatctcacgctcgatcctcgccaggacggcgacgaactcgccggcgtcgcaggggagctcgagcgggccgtccgccacgtacccgtactcctcctcggcctcctccagcagcgccctgaacagcgggtggttcacgcactccgtcctcaccacgaacctctccctcgccgcccctccgccgccgccgccgccgccgacgtacaccgcgaagctcccctccggcggctccggccggccaccattcctgtgcttggacaaacacctgtccagcagggccttcatgatcactccctgcttgttcctcacacctctctccttcatcaacacaacagcaaattaaccaaagcttatctgaacacaactatcctatctaatttacaacttagtgaaggttgggttgtattaattagctgatcaagtgttgctaattgctatggccttgtccttaagtgacatcagatcaaactgagataagatggttagtgatcaaagttttgggagggggtcagctaagacctggcctgaagaaagagtgttgcacttgcacccctgcaccatatatagactgtactgtgtggggccttcattttattttaattatttggtgtgtgtgacaattaggagtaagattgtatatttggtgtagatgatgagatcctgtgggtctttcctaatcctacccatcattagatatttaatccatggttaggttaatttttaccatcttgtcctcatattgcacaagggacctgttcttgacaagggttgtgttggcaagatggcaccatgttttgtgaaaaccagattatattgcaagggtaagttagtaatttcacatcacgttgaagacctttgtgtacttgaccgtggtaccggttcaaagtttaggatggaattgacaaaactgaaaatttgtttagtgtgaagctaaaatggctaatgcgaaaccagaggttggacaggattccaccatctcattgtcaacccacttaatatccaatgtcatcagggcaataatacacatgttagtataagatcataagaaaaatgtcactttattggttgcaagttgacttggagctttgcatcggtcagcaagtttaagtgaaactctccaaccatgactagtttactctaatgaatttccttcttcagaatctgccttttcatttctgtcagcttgcatcgagatctgtctgaaggattcagagaacggcacatcgacatcctaaatctgcccaagggtttaacacctggatcaatgcatgtcttaatcctatgagattagtttagaattcttgtcttgattaatggtgctctaatgacaccttgaccgacaatgagcaccacttgtcttgatttttgtggtgcaaaatgatactaacaaacaatagtaaagtaagggttaatttgggaggtagagtaaaagattgttcgaacaagacattgtttagattagataaaatcataaaatacaattcatttcgtcgtttagcgtgctagtctacttcaccttccatcatccgctcaacggtgaaattttttttatcgcccaaaccagctattattaccgcggaattgcgtattctactctatctttgtcaaatcactccacgataatctgcttgttaattcacctggtaatgctgtcttttattaatttggaaggttggaccccctactgcaaatctgcaatgatgcagatttttcatgcgtgctgaattttgtgctctaatggtggattgtgatagcgatttgcaccattttgtgcgaagaacttacatgaatcagatagatgaaaaacctcgagctgtcagatgatgctggagaggcatatgctattctcctgaaagctcaactgcctgaagtctgaactctgaacatgttgttcagttggcctcgttttctcacctttgctggaacaggggtaaataaatggtgacgaattgataccagaagaaagtgtggtaattaattaattaaaaagcataattaacaagctcaaatcacgatgctcaatataataattactctttttttttgttcttcctcgaactcgaagaacgcacaccgtctccctctcgactgtgactctccccgtgtttgggccacacgaaatcgagatcagaatccgttccggcccaatgagtagcatgggccgcacataagtctaatcctactcctttgcagaagagcgttccaccaccgcgtccgaccgccgacgcgaccggcggcgaccctccctcttcagccgttcgccggacttgcggccagactgatccccttcgccgccgggagcaagatcaggcggtgtccgcggcggggctcgtcgggatctgcccccatccatggtcgcacggcgccgcttctgactgctccgcccccgcgttgatgcgctgcccgcggcatcgagccgcaaggtaattcctcgtcggagccctcctattcgcagcaaattagacaagcagatgttcatctaaagcgttgggggttagaaatttcggaaactgattggtctcgtaaagcgtctccctccccagactccagagagtgatgggatttgggggggggggatgattatgctgtacaagagtagtttgatagcaatgttagtggtagaagtgaataatcttgtatggtctgatgttgtgtttgctgggatgttgcataatggtgtgtctctttttttttactgcttgtgtaggtttttgtcatattaatcatggtgcttagcaaggttgaagtgaacttgataaggctgcttgaggcagctcctcgacagcagaaccagactaagcttgtccatgtaagtgtacctcgtacggttttttcttagatacgaatttttccatcatactttgtttatgttaataggctaattatatacctttagttaggagaacaaagaatccctcaagtgagtatttttgtgtgtgtgttgaaagtaagaagggaatatttctggattacctcatgtgtttcaattttagcacttactagtagctaatgcatgttctttttaatcttcttctctatcattttgaatggaatctgtggttgcactgagattctccaatcaactgcagtatgtaaccacagccagggaactgttggagcagctaggatcagaaactactccagaagggatatcaaggtattcattcatgttttatttgttctctatagcactacacatatctttgggaatatcgacatgttggctgtagtataatcttcagtctgtgacccagctataatctgttgagcatccatacttaaaaagcactccagttagtatatgacaaggcaaaaaccaccaaatctctgatccaatataaaactgttataggtgaatctgatctctagatcctacactgtatttcatgacactaatatgaccaattcagtgaattgttttttttgttaaaagactactggatgctaattttgtttacatgatgctgctagtttgctttggtggatggtgtgttcatactttcaacctctgtacatgaatgaatcaggcataatctactgtaatactattcaatgagcgcaaaaatttgatgcactaactacttagctacacgtatcttaagttagttcctagtcaataattgatcttcttctactagtataattctttagtatgcaccatgctttcccacatgataaatactctgtgggagagcattgcatattttgtagctctgttttcatttggtagcagttgttcttgaaaatctcaatactcctttaaagatatgcttttctgtgcgtgagaaaagaacagttatatgaatgtttacaacgtaaattttagtcaccttccttcattttgatgaacctcagtttattatgtagattcctggatttttgctaccttttccattagcaatcttataccttgtttaattgtcctgttacccagtggagcagagcaagcatttacctacattgagttttctttttttttttgtgttacttgtgtaatataatatttttccccatgatcaaacgatgttcattcatgaatttcttctttgtccagtgtatcaaaagctaagacaagtgagtattcagaaaagattgaagcattggctgcccggcttgctgctccagaggtatgctgttgtcgtgctaatatcttaaattcctcaattgatacttcagttctttttttgggtgtggggaatagttcaattgaatgcaaaaccaccaactgcagcatatggtttacttagttttttcttcaaacaaaatcaacttacttttcagaacatatgcagccacaataactcagatggattatacttttgtttgatttttcttttgttcagccagaaaatgaaatgccagttgatgagaatagagaggtagaaagctcttatgaaggagataagccaggaagtccaatatcattatcatcaggattacgtaggagaccaatgtaagttttaaaatttgtatgtttctttttcataattattacaattagcgagctaataatggatgtaaattgaatagagctcacaacgttgttggacctagcagtcatgagagaaaagacagagacattggagcacctattaaattggatgaagaagcacaggctcatattgagaagcataggtacattaaactcttctgtatcggcaaagttcttttctttcctggtctctggtttagcttctgcgttattcttagcggcaaattcccttgttattttctaaactcatcttctaatcgcgcaggaagctgcaagaagatctgactgacgaaatggttgagttagcgcgccaactgaaagagagcagtctcaccatgcaccaatctgttcaagaaacagagaaggtagtatgcttctttccttcacctctttttcctgcagctatggtatgttgacattggcaactgtttgggtagatccttgattccaccgagagagctgtcgagcatagcttggcgagcactgggcgtgcaaccacgcgagcggcagaggtatactcgctggcttccaagacgacatgcttccagtggctgctcatcttcatgatgacctgcatgttcattatggtggttctgctcatccgggtcacctaaaatattgtaattggtgttgtttgagactgactgattgagttttgtattcagttgtgacaatgagcatgaacggaaacgaagtaaaaaaaaagtttggagaacctctgccccttggttgtcaccgcaattccttatccagttttcacataaatatacttgcattttggatatttatatgcagtatattttcggtgcaaattagattatggagctgcttattttggctctgacgactctgtgttgccgaagcacatgcatatattacaaactgcatatgaaatgcatatagtactatagtagcactttctcagttttatgttataagactttcattggtttcatattataagacttttattgaccacattcatatatatatatacgttaatgaatctagacacacgtatatagagtcattaacatttatataaatgtggacaatgctagaaagtcttatactccctccgtattttaatgtatgacgtcgttgactttttgataaacgttgaactttcatcttaatcaaaaaatttatgtaattataatttattttattgtgatttgatttatcatcaaatgttctttaagcatgacataagtatttttatatttgtataaaaattttgaataagacgagtggtcaaacattgattaaaaagtcaacggtgtcatacattaaaatacggagggagtagtagtgtagtgccctttttaacgtggatgggctgaaaagcccataaaattcacgtggcccatcaagtcaccatcaatccatctccaattctccatctctcgtgcggctgtggcgttgagctgagaagctgagcacccaaaaagcagcgcgcgcgcgccggccctagccacgacgcaccacgcgcgccggccgccggcgaggcccacgaccgccgccgcacgcctttggccagatcgcgcaggcgagatcctcctatggccgcctccgtagcgccagcgtcgtcgtccggctgggacttcacctggtgactctccctctccctctccctctccctctccctctccttccgaatggtgacgatttgcgcggtcatatttttttttcaacgattcgtgccttctcgatgagcaatttcggatgatatttctcctaccggagtgcatatgctgctgtggtgctgtgctatccccgtgttgctttcacctgcgctcgtggtgttcgacgaattgcctaaaagaagcatttgctactgtttatgctttctttggctaggcggcggtttcatttcagtttccctgcctatcaatgtgttgcgcatacttccttatacctttttttttacccccaaattcatgcaaatttgagacctattgatactatgatacatagtatagggcaatgactgctattttcgaagcattttgaactgaatcggtgggaatacctgattattttcatggagtaaatatcctgtcgtaattggtaaagctattattttgcgagggtacgcaaagctttgttctcaatgtaaagccacgaactgatggatcattaaataaaccagttccattggcgacatttagtttctttagagttaagactggaagccagaaattctgtaataatttatcgtagtgtttagagttcagacaacacagaagaaatgaaagtgtgcagcatctgttaggaagttacaatgatgtcccactgacgcacaagcaaatttgctgggttatggaaattagagcagaatagtgattttatcgtttgaccatatagtgttattaaatgatgtattttcatgagcgaatgatcaatgccaaaaaaaaatagcttaaaaacttgtggcgaatggctgtttcatggctatagtctcacaaacccagccttgcagaaaactcttggagctagtagtaatcaacttgatatatgttgcttttatgcatactgaatcatctgctacctttaatcatcctgttcctcagacattgctacttacgcatagtattgcatcaactatgtagctcatatgtagagaaaatttatcttgcactaacaacctttttgtatggcagtgactttgaaattgattatggatccgaggaacgcgcatccatagtttacaaaacgctagctgttgataaggaggtaagaagttatagtacactttaacatggttcttgttttcataaggagtcccaatgtttcctcttttcttcatgctagcttgttgagaaaagaactcgaatcctgtggtatttatcttgcagttgcaacctgacaaggtaaagagggagatgtctgtttctggtggcaagctcgtcgtgtcagtaaatccattcttaacaattgctatcgattgtgtttactttgattcacgatgtgtactgatacaaaattttctgaatctaattcaggcactttgaagctgtagaggctcggttcctgcgagcatcgttcagcgcgttcgtcgatcttacagtactggttaccaagcttgttgaagaatatggcatcagcaaggaaggagaaggcagtatctagctagttttactcccctgtatcttagaaaaatgttttacaacacctttgagcattcataccttcttttatatcatattatgtgtgttcttcgtttcttaggccagaaatctacaagatagaagcagctgttgtaattccagatttcttgaatcttggtatgggatttgcctctcaagagtaactctgaacatacttggttgggatagtagtcagttcttgtcgccttaaatgaaaaatcatgcatgtatagctcactgtattatataacctgataatgatgatgatgaatcgtaaaaaatggacggaaatccaagaatgcttcgtaaatatatgtagctgaaaataaattgactcggataaagctaggaaaaaacagaaacaaagtctcccctcattaattaatttagtaggaagagaagatgacaagagtgctatctcattgatagaaaaatagaattggcggaatattactccctccttccctaaatatttttgatgccgttgatttttttaaacatgtttgataattcgtcctattaaaaaatttaagtaattattaattctttttctatcatttgattcattattaaatatactactactatagtttttaataagacgaacggtcaaacatatttaaaaaaaaatcaacggcgttaaatatttagggacggagagagtattacccaacaatacaattaaacacgacgtacgcacgatcattagactcaatttaaattacgacaatacaattagccagtctctcatagccgaccgatcagctaagcgacatacacgcgtacatgcaactaaatttaaattacgacacacacaaaacctagacacacagcaaactaaatttaaattgcgacacacacacagaaacgaaccttagctagctctctccaacctcactaaattgaacatgacacgaacacacacaattagtacagctacatagtactacgctactactcctatatgggacacaggtgcatgcgtggcacggatcgatcacactagaaaatgatcgaactacgaacgtcggcctgcaggaggtatcttcctgggcggcgtagcgtccctggggctgtccgacttgatggagcacagctcgtccgaatcctcgccatctgaagtccgagttatgatcaagtcgtctatgtccagatacatcggtggcagatctgcaaagtttattaattttacagcaattaatgcatgcaataatcaagtaagcaattgaagctatggcaataatgcaagaaatcaagaatcaagaagaagaagaagaagaagaaagctagaagttatataccgtgtttctccctctctcgttgtgtttcactcacgctctgctgcttctgggatgatgaggatccctgactttgctcaccttcacctccatgctgctccccggtgcccttctttctaccagacttgagagctaccctgtgggccgctagatttcctgtaggttccacagccaactcacaggaatattaattttcttgacggggttacttatacccacagaaaaattgtgttatttttgtaggttttcacacagacccacagaaaaatagcgctgacaagtaggcctcaagaaccatcaaataaaactcaggcagccaagtcccaaaacctaattccccacccctcttcccaaaccctcgagccgtcgccgcccctctattctctccagatccgcatggcgagcgcctgtgcgataccttcgacgaacggcgggtcggctaccgagcctccgcccagcgccatcggcaagatgcagccgaccatcaccaccatctcctgccggcgacgagcttccaccatcccctccactgccggtgctagccaccccaaggcccaagctcagaacctctagatctggatgccccaaccctgggaaccacggatccagccgtatcgagtgtgggtgctccagatctcgcggttctcggctccggcagcgccggcaggagaatgggcgctgcccctccttcccctcctcttcagtaagtaaaagcatccaaaaatatgtgtttcaatggtgaggaaacggtttggagcacctctgtccatgctagcatgtgtttccgctgctaatcccaaacaccgatttgttcagatagccgccggcggagatttctaggagttcaatttaatctgctccaaagttgcagccaaccattctccttcaggatgaaaaagtgtaagtcatactagtttacacttgtggattattttggctttgatccgtattacgtgactgcccagtagtagatctagattgggttattggcccttgaccacaagtttaatgattgtcagtggaatgtcagtagatctagattgggttcttgtgtcaaaacctgcgttgctgcattcatcaactaatctagattggattagttgatccattactgttgttgccaattattattttttctcagagctctgattcccagatattaagcaagacaagttggttcccatattgtctacattatgtgatttagtttctataatagaaatttaattttcttggattacttactcctagagtataatatttattttacatctaaatgatttgtttcttgtttcagccttgtaagacaattatgtctggaccaactaattttcctctagccattttgtgaagacctaatgttgtggcatgacagattgacaggtactcccacactagagtccctgctattcataaaactttgtttgtgtctggtactgagttgtttgacatggaattaatctatcagtggattatcatgcactatgctttcttggtcacatttagttagaatgcagatgcttttcttatgctatttttaccttgcaattcatggtaaggattgtgtgaataatgagtattatagtgttttattttctctgttttagtagctaagaaaacatatttttagctcaggttgtatgcatgaaatcattagtgctttctagtctctactagtgcatatacatacttcacaagtccaagtccatgtatatcttttggcaagtcacatactgctacatgtgttggatagatacatgccatcagaacaataaattagtttcagtctcttgtttttaaaattttcttatgtacaaaccctttataatttaccttgttcatggcactttgtatttttcttaacaggccatagcttgaatctttaagtgctgcagttaaatatctacagaacgttgcacatgatgaaaatcaaggtatgcttctcattcagtggatgaaatctttcttagtctaagatgtcctagcatttgcaccatgaaacttgtcatttaagcatccatagaaaatgagtttgatcctattatcctagcatttatgtcttatctgaattggcagagtactacaggaagtattttcatggtcacttttcatttcagttgccatatttcattttcatgctttgtagttgacaaatttatgttgctcacttcagtttttcctgtactaatctatttgtttctctataactggggtattcagaatcattgttatttattttgtaatgaagaaaattatgaaattgaacctcttttttaaaaccttttagcttcctttgcccaaggttgaagcaccacggaacacggactgctgctggaagacaatgttcttttacatatgtttgatgaattgtaactgaacacatttatcttttctatggaccctttgtatattactaaatccggtttgaatgaatttgtatgtactgaacttagatggactatttatgtaagctttgcagacttgaattttgatgtatggattgtgattgatgttcatatatttatccaaatcaccatgtgtttttttttgggcgtggaactcattttttctgacggtggatgatggtttttcctgatgggtccacgtcaaaaataagctttcacaaacctgacgccagttgattttttttgtgagccaaccgacaggaattcccgacagaaatgatatttctgtcaggaaaacgacagaaaaatttattttctccgtggtcttttttctgtcggcaaactctgacggtgcacccacagaaaagtattttctgacggtaattcatattattctgacggttttcggcctacagggtagacctcttgatcttctttttcttctcatcatcctccttcttgtcttccgacgactgtggccgctcagcacggttcttctgcctgtccattggagcttaatttgctagctaactaataactatagctaatagctaggcgctggctaactcgatcgaaaagagctgcttatcccacagcttgtctgcaggttgcgatgacctatatttatagtcagtgtacatcgatcattgaattgatctttgttcatgcttacctttaatttgcttctgacttgctgcattatatataatccaggtcttgagatgaccagatcagtgcggcgcatggatgtgtcaaaagagatcactgaacaagtatagtacatgcacgtgaactagctagctactgtaaaatggatcggagtacattgcgacagagagcacatacgtactgtgaaacaaattaaacatcataatctaattcttgcacttaaatgtccaaatgctagtttctcgcaatctctggttgtagcagaaagagccttaattttggatcttaagagctgctattattacttgatgacgagaagtctctgtactttaattagccgtgcatccaaccaaagagtgcctccatgctggttctcatttcggtttagaagaaaacggagacggcccagcaaaccaaaacgacccatctgtgagcatttaatttgcatgtgtacgccttacgcatttcttcgctaaaaaaatagttaaaatttttcgggcttggttttgtatatatatctctctccctgcccaagctcgtccaataactatcgtgggcctttttttttttggccagacttcttcggccccggggaggcaagcctagggacaatgcatatttataaatgaacaataatccaaatgatttaagttatttatatatattattatacggttggtcagtgttggagaaatttattacttctttccaaaacaaattaaccaaatataaaatgtttaaattcataatattatgatgtatcgcatctcatatttaattggtttattgtaagatagagggaatactattaggtacgcttgatcatgtggtgtgtgccttgcattcatatgaatactactctcttcgtcccttaatataagagattttgacattttagttacactgtttgactacgtcttatttaaaaaatttgtgcaaatataaaaagcgaaaagttgtgcttaaagtactttggataataaaataagtcacaaataaattaaataataattccaaaatttttttgaataggacaaatggtcaaacagtgtaagcaaaatatcaaaatcccttatattaagggacggagagaatagtattcatatcaaatggaccaaatagaggcagctgatagatatagggatgtgctacacaaagacaagctcaatgtttatgtggtgtgatgtaatcttaggagtgagcccatgaatagtgggataatgttaaagcaattcgcacaatgctattgctatggctaggatttaagtaaccataagatagggccacatgagatagaaaaaaaaatacttcagctcttgtttatgaggtgaatgagagagataaaaatattttaattttgtttgtgatagaccttaagtataatgtgcaccataaactaatgctacttaccacaatatatgtgacttattttataagtgtaattattattttaagattatatttttcataaattattattgttgcgctaacgccatatcgatcaaaaaaagtgagcagaggggaatatgcatgatatatagcatatcacgggtatgattttgactgctagctgctgctgtatgtatgataggcacaaagctggttggccatgcatgtactgcgtttgcgtggtccatttgaccagatcgacgtgagccaaagcttaagtgcggtatctccaatagggaagttttttttgctagtatcataacacttatcgttttgctaaaactgaaatcaaactttgtacagctttaactatgaacaaaatttaaaatatttattttagaagcatggaaactatatgtatatattaatattgaaatatactttaataaaatcatacattcatgatatttatttaaatattgtaatagaaaatagtgataaagttgcttcttaagattgtgtcccttgttcaaaacaacaagcatatttttaaatggtactacctccgtcccatataaattataattctagatggttgcatatattaaggattgagaaaaaaaactataatcgatgctccttattaaatgttctatatatagataaaagtggaggggtagttgagggtaaaatagagataaatttgaatgagaagtgattaatgagaccattaatactatattgtgataattattttgggacaaatttaaatcctagaaatataactattataggacagatagtaactagcactctttttaaaactaattaatatgggtgttaaatgctgcgtgcatcttggaatgcgttatatataggagtatactactagtagcttgtgtgcctataaatataatcgtatgtcatatttaaccatattaattgtgatatatattatcacgattgcatgcatggtcaatataattcttttatttattaattaatgtaagagtttctggcatttagagtaaacgcgatgttacctttattttactatgtttataatatatatagtccagtatatatatctgatacattggttgacaaacttagtattacttaaaaaaagatgacatcaatagcagtttatttcacgtacggtaaatcaatgcggcgtacgttgctagacaaaactagtgcgtaaaaagtttcgagcacacgcagtcataataatgcagtaatgcagatgaccaaggtgaatggggtagtgcatgcatatatacacttggtcaactctgtcgtatacagtagtagacatgtaaagtactaaactttattcggtctcgtcatcgatatatcgtcatactactttactgtagttcatcagctctgcatttgcatatgcatgcagatatgattcgacgaccaaaattaattaaggctgtgtttaatccaaagtttgatccaaacttcagttattttttatcacatcaacctgctataaacacaacttttcagtcatatcatctccaattttaaccaaaattcaaactttgcgctgaactaaacacagcctaaggtgatgtcaaccacacgacgaagacgcgcgatatgaagcggtccttgttaggataagacgtactacgagcgatccttttggacctcatggtcagtactccgcatatccgtactgacgattatattgctggatggagcggcttgttgcatttcatttccagtagatatagattaattgtttatttctttatttttttcttaaaaatccagttaattagattgcacagatggttttatatatgatcttcattttggacgtcaacgaaattacaggagagtgaatcgtgttagcctagataaagtatggttgggctagtttgcccatataaatatagtttccgtttggtccactatgaactctgcttgtctacctaccccaccaccaccacccttttctctcccttggtgaataatccaactttttttttcgcgaaatacattacagacggagacactcatatatacaaacgtgcgcatgtaccctatatatctctatgaaatatacaaaaatgccaataaggagtacatgacataaaaattgcaaattagctccatcagcatagactacgaccttcttttttgaaagtcatggggatacgcaaatgcaaagcattcgagtggcaagttatctactccctccttccctaaatgtttgacgccgttgacttttttaaacatgcttgaccgttcgtcttattcaaaaacttttatgaaatatgtaaaactatatgtatacataaagtatatttaacagtgaatcaaatgatagaaaaagaattaataattacttaaattttttgaataagacgaacggtcaaatatgtttaaaaaagtcaacggcgttaaacatttagggatggagggagtaatatagaatttggacggaggacacataaactactattgccctctctgcaaatataccttcgaaacttacttccatctccacacgaaaggcagatacacaagtatctggaacatattagcaacttggatcggctgcgaggagggacttctgaaaggttacaaatacggtgcacaagtacgtggagtgcccacctaaaggtcctgtctagacctacgatggtgaggcgaagactgaggcacagttacacgctgttctattgtgagcatgaatgggatgatgttgcgtgccgggcggctggcttgggtcgctgtgtgtcaacctcggacgacccaatagatagtggaacccgattagagcaaggataatagtgagatatgcttatgtggaggagagagaaaaaaaggtgttggctctcatgcaagagctagctttgcacgtgctccaagacaaatacattaaatgtataaatgagagaaaaagataggagaagaaaaatcaaagataatcttagagctagctctgcacgtgctgtttttcggaaaaacccctttattttttatctttatagcgctacctctagaagcggaattttcttttcttcgcattgtatttctgtgaaataggagggctttttcagaacaaacacaacagggtgttgtccagtctgaggacatatgcgatattttgtgcaaatacgaggagttttttttttttgcaaaatagccttttaatgaaaccggctccaacccacggtgcagacccatagcgcctaaaattgcgtttggccggttaccgcctacaagcggtcactcgtgcgcgcgcgaggagccaactacagcaaatgggcgacgtgtaaatttacgggatagctaaaaaataaaaaacatgagaaaaagggtacggttaggctggttattgattgatgataccccatctaccatggggcatagagagaaacaaccaagcaagtggttgtgccggctcaggtacgcacggagcccagcattgagacctcatacatctacaacagttggtatatataagcagtagatggaaatacattgaaatccctaagttaaggagctgcaaagacagatgaagtagcactgcaaaacaaatgtccctcttaggaggatgaaatggactacataaacacgagtttcttagtgcccaaatatatcaaccacaaaggtctgtaattgagcatagctgcccctgattttagatatgcagaccacagtgaatgattttcttacaagttccaagctaagatcattctacagttaaactcatgatctcaccataatacgctgggttttctctgggttgacaaatacactgattatattcatgaaaatcattaagcagtgcaatactacctacatgactcagcgacacacagaaggcaacgacggacgaagttatggcagaaacactcttaattttgtaagtgtttttgtatttggaagatcaacaaatcttcttttggatagggaaggtcaacaaatcatttgctcaagcttaatgttctcgcaatatcttctcattgtaagtgataaaacgaaacctgttagaaacttccgtttgaaagaacatgttattgaccctaaggaaagaatgtggtattgaagcattccaatcaacacaataagttattaaacagttgctatgatcacaaaaatgttcgttcttttagaaatcaaggtacaaaggaaaatatctggtttcatgttggagacatggcagcatctgattcatattcatgcggataaatcagttatcacatcttctgattatgtagagcttgtttttatacactcaacaagctgcaaccaaatgtcagttcgaccaaagtgttctgctcacatttcctaattaagtatgtccctgttctgctcacatttccttagctcacaaataacagaggatttttatttcgaaaatactgctaaggcttgggatctacggctcgtcctagggtcaagggggctctgataccaacttgtcacgaccggaaataacccaacgggcgttccttacgtgcgtgcattaatccttgtcccaggaggcaaggtacaccaaaagttgatacaattcagagtttaacaagcggaagcgtaaatagttaatttattacatgggcagcgaaggcccagcacacacaaagacaaacgagaaacagcggaagactagggcgacgaccacaggcacttgacggcaggcacgagctagacaccaaagccttcatcttctaggagctcctcttctgagtttgggaaaaattgagcaagactgagtacaaccaccgtactcaacaagacacacccacaagtgcagaataaatgcaagggagtacaaaggagttatactataaagggttagggttgcagtaaacagcatttaaagacattagttgctcagggctattttgcaaacacgattctagtactatacaatattatttatcaaggccgtgaacccacacgaacctgccttaacccaaggcctacgatgattcagaccgaactggcaacccgaccctgggtcccagctcgtcccaagccaacccaggccaaccattccacattttagttgttaagcaggttttaagaattaaaacactaacttgggtacattgctcggcttgcccataaccgagggcgcggctattcgaatagattatactctgatcagatgtgtacatctttacccacaagacacatcttcctcatatgtaaccacgtgccacataccaccacggtatacagacgaaagacgtgacatagtttccaacccatcctagccatagacaagagtaccgacccaatcccacctacggccggaacctccgggacaggcaggtaggactgagcccctagcagcaggacaccggccctgtgccatgacatctcgactaccgggctgcagctcgtgtagccttcatttgccctggagatgtccatcgacccccgacttcgtccatctccatccgtgtacttttgtttataaccagactgagccacaaactaagccttacccactagacatgtggaagtacggtagtgctttgcaacagaggcccgaagaccggtccttatatggccgaggtgctactatcaaaaccatgcaccccgagcccagcctaaaaccattttttggggattttgagtagagggggcggtgtgaatccaattccacaatactccaacaattccataatatctaggtgatatgaatattcccaaagtctagagttgtgaaaccgcctaatgttacctaattaaagcgaagcatctacctaaaatcatactagtgataccatgagtagagtgtccactagttggggttttgtttattctagggtgaacaaggaaataataacaataacaacaataataaggtcataacaaagataaataggcatggctaaataaaacagtgattacgcgggaatttaaataaagcgataatgcaataagttaaatcaacataattttacaaactgggattcaatatgttcaaagatgatgtgacttgccttgctcgctttcccaaacgccggcttcaacctccacgaagagcggatcttccgaagctgcagcgtctacacgtccaacagaaaagaaacggcttttactctactaaactccatataacaagcagaaacaaagcacaaaaatgggttcttgacttcttaaggaaaaattagagacttgaacggtccaattccgagttcaaatggccaagttatggccatttgaagtttatatgctctttaaatggatatttacgaatttcttcatttaaattttaatttaaaatcggatttattgcgtcagccgggagagaggagcgcgcggaccgggtccacgggagtggggcccacgcggcagcctctcggtccacggtggaccgggagcacgcggcttacgccggccggcgccgtgggtcccacgcgtcagccgcacctgagggcgcgggcggctgacggccgggccccacatggcagccacggggcgcgcccgaaggcggcctttccggcacagccgacgggaggcggcgtgcccgcgcccctatggtcgccggcggcggccataggcacggcggagcggcggccgagagaggggaggggagggggaaacgaaatgggcggtccacggctcaccccgggtcgacggcgacgacgggaacggcgaccggagcggaagaaggcggcggcgcggcacgggtcgacggggacggcggcgttctggcggtcggcgggcgaaacggaagggtggacgaggtcggcgaggacgcggcggagccgaaggaggcgacgccgaggcgggaggaggtccgaggcgacgacggcggcggaccggagctcggcagtgacggcggagagagagagcgatggcgcgagctcgattccggcggagagagagagcggcgagtggcggaaacggtggagggaggcacggggagcgtttatatagtgttgggagggggagagaacggccggataagggggaatcggccgcggaagatccggccgccattgatgcgccggcgaagttaggggaggagtttccaaacgaatccgagggagagagagagagggaaaagtgggggaaaagagggagggaatcacggggaatatttcccccctcttgattgcacgcggggcggacgggagcggcgggattcgcggcggcggcggcgctagggcacgggcgaggcgacgggtgcggcgggagcggcggaaggtaggggatgacgggtgggccccacccgtcagcgagggtggcgggcgggcccgcccgtcagcggcacacgcgcggggaggaggccgattgggccgcgggggagaggagagagagggagggaagtgggccgagccggcccaagaggtagagggggagggaaagggaactttttagggtttttctttttataaaaccattttaactttgtttatttcttaataattattatttgtgctctgaaaattccactaaaatttatttacgcattttaggcttttaggaaatatacaaaaatcgtccaagccttatttgacttttaactttgcacattttaattgttggaggctttcacatggattttacttattctatgcataattttgaggatgtattttagagtcgttttaggacgcgacagtgagttgaccttcttcctcgggctacaagtgaagcaagcacaagagggcactttcatctctcaaaccaagtatgtaaaggacattctcaagaagtttgggatggaagatgccaaacccatcaagactcctatgcctactaatggccacctagacctcgatgataatggtaaatgtgtggaacaaaaggtatatcgctccatgataggatccttgctttacttatgtgcatctcgtcccgatatcatgcttagtgtatgcatgtgtgctcgctttcaagcggagcctaaagagtgccatttgattgccgtcaagagaattctaagatatttagttcttactcctaatcttggcttgtggtatcctaagggttgtgactttgagcttttgggctattccgattcggattacgccgggtgtaaggttgatagaaaaagcacaaccgggacttgccaatttcttgggcggtcccttgtttcttggtcctccaagaagcaaaattccattgcattatccaccgccgaagccgaatatgtcgccgccggttcttgttgtgcccaactcctttggatgaaacaaactctaaaagactttggctacaacttcaccaaaatcccactcctatgtgacaatgagagtgctatcaaaatagccaataatcccgttcaacactctcgaaccaaacacatagatattcgccaccactttttgagagatcataagaccaaaggaaacatatgccttacacatgtgagaccgagagccaattagccgacattttcaccaagcctttagatgagaaaagattttgcgagcttaggagtgagctcaatatcttaaattctcgcaacattaggtgatgggtggttggctaatttatagtcaaacatgtatcactaaaatgtaaattaaaaaaaaattgagcttttgtgtcttgagatcacttcttggtagaagatgatcttgataccaggaataaagctcaaacatttcccctttatccaaaaaccccttttgtgataagttttgcaaaatcctttgtgtgccttttattgcgaaaatttggtttttattttcttcttgtgatgtatattgaccatggttatgtaatgttgactgttgactggtcatatgcatcataagtctctgcatgtccttagttctctatttcccttcgttgaattctcatctcctccttgtttttgggcctgactgccctttttctgtcaggccggaagttccgggcctccctgtccggaacctccgggtatcggggagtatatatactcagggggagttagaaaccctagtctctctcctcatttcttctctctccccgacgccagccctagccgccgctacagtgcccctagtggcgatttcctcttccaaccgtgaaaatttgattcttctccgtggaatcaaccacattggtggtaggaggatcttcctgcgatcattctacgatttcctctctcaaggtagcactttttgattccctctctcggttcattgtgttttttatcccgatctcttaatctgtgaacctagggagaaaaccacttggatagtcttgttcctgctaccttgtagatcagcgatctataggatttgttcacatgcactggctatttttgagacccctgttcttcatttttgccggccggaagttccggtgctcttgcacccagaacctccgggcgctgtccagccagcctgcaattcttgattctctcaaattttgcctaactactgcactccaatttgttgattcctgttgcagtaagcactatgcctcgtgagaaaagacagaaagcctctcaggatgtgtctggtgatgagagtcctcctattcggtttcctcgtggtcgtttgggtaaagagaaagtggttgaaggtggcagtggcagcggcactcgtacttctcctaggtttaccaggcaatccagcaaccgtccagttcagattcgagatgttgacagtggtcaaggaagtgatgctccttcttcaagaggtcgtgggagaggtggtggtcgcacttctagggctggaagggcgtctcatgatttccctgttggatctcgtgagaatcccgttcagctctacaagactcttggatttgacaccactcctatgcaccacattggaagacccaagtccaactaccttcatcagcttgccaagtgcagaagggaccgtttgcttgatccagagacacagcctgaggagtcacaggatcctcgttttaggacgttcacccaattggattggtataactcagtgattatagctagagacaatccaatggttgagatgaagtggattgattggacttacataaggaagaagaacaatgaagtgttcaaccaagcaatgcaagtttgtcacaacaagaatcttggagatattcttgccttggagtatgattggaatgaggaggtcattgcacaattctatgcgacagcattgtttggtactactaggaagggaactccttatgtaaagtggatgactgagggtgttaggcacaaaatttccatagcacagtttgctaagatattgggcttagaggatgaggatctcaatagccctaatattcatagtgaagcacccctccccatgatcaagactaagttcatgtatactaaggatgctcctcggacttgtatgggaactactcatggtttgcattcaaactacaaggtgctgtactccatctttcgttggtctctgcttccaaaggttggagatgctactgctttgccatccaagcatgctcatcttctcagtcgcatgcgctacaatcagcctcctttcagtgtgatgaagtttatttggtatgagattgccaacaccattcttgagcctaagcgaggttgcatttatgctcctttcattatgaagatgattgagacagtcaccggagtgttctacatcaaagatgggcgccacaatccttttcatcctcgtgttccaccttcctcttatccagtgatacctagatccatcccttctacctcagctggtccttcttctagtgccccaccgcaatcctcgagctcttctcccatcaagaaggcacttcaggcgatcttctgtatgtgtgctaagactgcaaagaaagtgaagaagatcgaaaggcgtcagaaggaagatagaagagaggctgggaaagaagtgtaagatgattgtaaagatgaggtctatgtggatccttttgaggcttatgaggcagcccgcaatgttgccggtgaaggtccatccacctatttcaatgaagagtcttcccgatcagatgatgatgaggaggaggatgacgccgaggcagctgctgaggatgctcccactgatgttgacaccgctgcacagtccgatgagtctcatctctccggtgataccgagattgttccctccgatggagatggagatgagtgatcctcttcttctcttcatggtttcttgctttttggtgccttgatgccaaagggggagaaattgtgaattgaagggggttatttaaatcattttgcgttccgggtcctatgatctggaggttccgaccaggcagattccctcccttttatctctctctctatggacatgtaatcatattcttttatgattggatgtaatgactgttagatgctttattatcctttatgtcagtaagttagtccatatgaatgttgcattttgatgtgatgtagtgttcttttcatctttttgagtgattgccatgtcatctagtctttcttcttgcgtatcacacatcttttaagcactcacatctgcatcttatttgatgagggtagtgtgaagtttcttttgaggtttccttcatcttatgcatattgtattcatctcatttcattatatgcatatctttagggggagcttcatacttctctcatcattccaaatttaaattctattatctttttgtgtgctttaaccatgttgtcatcaatcaccaaaaagggggagattgaagatgcacttaaaccccctagtgggttttggtgattaatgacaaggtggttaaaggggactaacgtgtttatcaagtttattcacaggagtttagtcccaaagcaagttgtgatggctaagaatgtaaggagacccccccaatttgaatgttcctaagtgcaaaaaacatcgaaggtgattagactaggtttttcactttcgaaattgagtttaggaaaaaccgtactattaagaggggtttcaagtgtggttccaaggtatacaaagtgctcttagtcatatccatgagtctaaaggtttttggaatcatttttggaaatgattttccccgagacagagaggcctacccggaggttctggccggaacctccggacaccaaagtttattttctccccgagacagagagggctacccggaggttctggccggaacttccaggcaccgaagtttagctagattttttctaagtgctacccggaagttcttcgcacttttgcccggaacctcctggcaggtttctagttcaatcttgtgagtaacggctagatgacgtcacctagccgttatatatatggatttcgtccccaggtcaccctttagccattccacttcagctctttcatgttctagggttttctagccactcccaagcttcctttgcttcctccactctaatctagagcctatcttgtgagattgagagattagattagagtgtaggagtgttttggagatggcttgaagattaggtttgattgagcactttggataccttgtgggctgtcacttgggcttattactcttggagatcttctcctagacggttaggtgtcgcccgtgagcttccaaagatcttgtggatgtcccgggaaagtttgtgaagattttcctcacctccgcaaggaaacgaggtaagtgagtaaagattcttgtgctgagttttcagaggttatcctaggtagagcaacttgcacttgtggtcttttctagaaggaattgtgagttggatcttggtggtcactcaattctagaaaacgacctagaagtgttgagttgaaggctgtggacttcttctgagatcttttcataagtgaggcaaggggttaatcgagacccggctctttgagcacctcaacggagagtaggatctgtgtgatccgaacttcgggaaaaaatcgcctttgtctcccttgtgcatgatctgtgtttgaatctgctggtatcttgagaattacatcttgtgcaactctgtgcctgatcatctctagctaggacctgttatacttcccctaatttcgtttttctctgctgtccggaagttcctggctcaagaacttcggaagttccgggctactcatcctacccggaagttccggtgttcatcaccaggaggttccgggccctgtcaatttaaccgctgcgattgttgagaaaatttcaggaaagcctattcacccccccccctctaggctacatctctgcacattcagaggagaggaggaggtacctcgatccgatcgtgcacacctctccgatctcagcgtcgatctttactcccggttggttttaccaaccaggactataaatagatctttagtcaccaaccgggagtaaagcgtatggcgatcttttttcccggttggtgttatcaaccaggactacaaatagatctttagtcccggttgctaacaccaactggtactaaagattgaaaagtaccatgtagcttttaaaccgggactaaagatatttttagtcccgatttttaatataacagggactattgtaaaatctggtcgaccgaccaaagatggtttctgaaaatgcatctaggcccctaatgattttgatgattgattactatgcgattagagaggactaacatttttattcaagcaaatgtgaaggttgttaagttctcaacgtgttgtaatacaatgcatatcccgtgaatgcgacatcgcgatgcaatgcggcaatgatcaaatggtatattgtatctttttcctcgcattgtgtcgtaggaaagccgtactattaaggggatgatgcatagacatataaggagtgatgcgtgtgctcaaaatcaattttacttcgaagcatttctcttttggagcgttctggaaattttcggatgttccgaaaatacacagaaccgcgtttgggcgttctggaaattttcggaagttccgaaaataattttcagaagttccgaaaatacacagaaccgtttgagagctctctggaaattttcggaagttccgaaaatacacagaagcgttctggaaattttcagaagttccgaaaatttttttcggaagttccgaaaattgcgttgacttcgatttttctcagatctggaattttcggaagttccgataattgtttcggaagttccgaaaatcccttttattgcactctaacgggcagatttgtgctgtgggtataaatacccacctcccctcacttgtgagggttgctggttccattccaattatttgtgcccttggcttgctctctctctctctagttcatttgagccttgcttcctcgattcatctctccacccgtgtttgatttggatttggtgtgtgtgtgagagtgtggattcgagcttgtgtgggtgcttcttgtggtctttgtgaagatttgtgagcaattgcatcatctccgggagttctttgcatcatcttttactcttggaggttgaggactcctagacggctagatgtcactcccgagccaccgatctacttgtggttggccaggagaagtttgtgaaggccggatctcgcctccgcaagggaagagatacctcttagtgaaaggaggagtgcttagtgcaacctcttgagaaaagggttagctaagacccggctcttagtgagttcctcaacagagagtagaatccccttaaggatttgaactccagggaacaactttgggagctacatcttggtgatatttcttcatccctctcctctagctttgcttgcttgtgccgctattggtctagttgctgattgtgccttgtattccctgttatagtcttatagatctagagttttcattttgtgtgcgctgctctgtgcattttcggaagttccgaaaattcccagcctagctccaaaaattactgcttccgtatttcttaagttttaaattagcctattcaccccccctctaggcctaattgaccctttcagtttctccaccagtgtactatagctcccacgcgtgcactatgagtgcctcctgttttgcaaatacgaaggcacattttactacttgggaaatgtagacatgtgagaccaagcatgtggcccaagatgtcaaataattgatgctaattttgtggaatggcaaagtaccgaaattcctaatttgtgtgccatcaacacaaactaaatcattgcaataaatggcttaagtgagagtatacatgtggggttgtgagataatttggcaaatataagggactatttcaccaatatgctgttattttaatctctggttcatgtggtatatgccaatattttatttatttattggagttttaagaaaagtatgttaccattggcaaatcataagactaattagaggtcccataacatataatgggccttcaaaatgtaacaaaggtaaataaaagtccttgatgagaagtaaccgtcaagtctatgtaaactacatgtgcaacttttatagatgagttcattgacacatatgaatttgtaagctttattcatagcaaattaatagttccattttggtgacaacaggtataaagcacaaacatcacaattagtactgatcattccaatcctagtacaatctagatataatttaaagggtttttcttcttgtgcctttggcagaaggatttgatcctctcaagaccatccaggagagaagatgaatcaatagcaaaagtaatgcgaacccaattcttcattcccagcacactccctgcatttaggcaacatagttaaattaggatacgtaaagtatatgtataaatacattattcgtaaaatagaaacattaacaaggctataacatttactttatttaagatattatattaaatctctagcttaatttactactacagagttaactaatatttaaagtggtagcataatattagatctctttgttagtttttccttcagtacttaaagtaatcaacatccataaactaaaaggacaaagtacgtgtacccaaatattgttggacattgaattatattttctcatataattaaggcatacgcaatttttatttacatgtgattggccctgttcttttcctcttacagattatggattcttacaagcacactttccaagctcatggatggtgcggtttttgcaaaatgttttctacatataagtttcttgtattttaaaacaacttttatcttttagatagtcaatatccgtttgtattctcaaatattataaaaaaagcagatgatctttcatttgttcatccataagacaaaaacaacaggtagggatataatgtgcctgtctgaatatcattgcatcactttgctaaattttctttcatatatagaaataaaataatgtcgtcatattcatatatcacatataaaaagtttacatgcaatcaataaaaaactcataaccacatatatttaaatattctaactaaactattatctattagtgattagagatgcaaaactaaaagtaattaactattaactttttttaagcaacaaaatcatagaataattttcaaagtttcataacaaaattaattaataagcataaatgtttagccaaaaagtaatcattagatttgtgagaaactaaataaggtagcatcacttatatgtcatggtatagcgttagagaattacaagaacataacaagtgaattgaataatataatattaaatttttaactttctttaattaaataggcacatacatatccatttattaacaaaaatgttagatgtacctgggcaaagaatcaccgactcttctttcgcaagttggcaacaaaaatcaacatcatcatggattccctccaaaagatataggttcaatttcacctgtttataggatttcaatgtaagattactggaagtgaagcttaagtgacaagtatgttgtagcaacaaaagaaaattgatgttaacatggcaaactacaacttcctaattatagcattattcttcaacacaatacaccaaaaatttctcatgactctgaattaagtgttttaggtgccaactaaattaaatatagcataattattttttgagtgtgataaattgatgctagtacagctctaatgataaaatgatttaagaggaaatcttaccatcacaaacatggatccttcgggcttgtgaggacaagtgatgcatttaatatcctttattcctctatagcaaatatctgatgtttccgtaagcaaatcaattatcctcttaaagaattcttccttggtattcttaagaatattcggtagagctccctaagaaattcaacaacaaaacatgcacaattcaattatttgagataaaatgaatacacgaggccaatataatatttttaaagcaagataccaataaataatctcagtataagaattgtatgcttactttaacgtaacattgaacttcacattatcacttaaataactacgcacctcagagtgaacacaaaatacaaacctcatcttctcaattaatttttaaaacatattattatgttttaacagaaataggatgaaatgaacataaaaaactgaattaaactttttttgttactttgatgaacttatgtttgattataactctgattcataagtactatttatttggtaagtattcgatagtatattttaaaccagtagtttttctcagctacaaacaatgctagacaccacactgtgcattttgaacagccatccaatttccgaagagcgaccacaacacatagtccaccaaacattacataaagcagataaatgaccaaaattataacccaaacattggcttgttaaggaaaaaaacactaacctgaatgaaagttgctggatcagttgaaacattaaggaaattagtaattaatgttgcaatctacaaagaaagtagtatacacttagaaaaatatatatttcaaatatcaattcacaaaaaaagtatcaaaacagtattaaatatatattttaccttggtttcttgtagagtcttcttggggtcacatattgctacccaaccaagtcgccatcccggcactatccacctctttgatagcgatcctatggttaatattggtacgatgtgcccaaagcaacccattgggacaaatggggaactcccaaaaaccaaattaccatacacctcatcagtaattaccaatatcccaagcttccttgctacctctgccacctaaataacaataatacatatgcacattaataagttgcccataatattatttaaacttttatcaaatttaaataaaccagctgaaccttggataaatgctcgtaagtgtacacattcccgcatggattattgggatttatgatgactatcgcagtagtgttcttgtccgcaatagattctagggagttaaggtcaatctcccagcccttctcaggaataagatcaaagtgacgaacttcaaggttgttgaacgcggctcgagcttcatagtttgggtagcctggtctaggaagcaatatgtttgtgccaggttgggcaaggattgagattacgacctcgatggcctgagttcctccagcggttaggaagatgtcatcagaagatagcttgtatgggaggtcgcgtgacaaatgatctgccacagcactatattcaaaagaaaggcacaagattaatcaagatatattatgatataattaacaatcacataagcaagcatgaaccaacatcacgtaaatgcctctttcaggaagaactgcatcctcggcgcaaataaaacatttaattaataatcatacatgaaaaaaaaaacataatgaacaacatgccattattaaaaaaaacagcatgtaaaatcctttctaaagaagaaatgcatcatcaacccagaaaaaccgaattattggactatatattcttctcccctgcttctagtccacaaaaggcacgattgttctcaattcaaaagagagcacattttccttcctttcttttcctcctctttcttttgttttttcccccagaaatccagcagctacagccttcagtcctacagctagcacagatgcacaatgaaggctccatccaggctgtgcgcccgccacgtcggacgagccgcagcagccggggggcgtgccagcacgcggtgggggcgggcgtggacgacgcggggctcgtgctcccccgccgcgggcgcgtgcgccgctcgggccgtacgtcccgtccatcgccagccgttggttccacttcagttctcctcccctactagctctcgccgaccacgggagtagtacgcctcgagatcgacgccaatacagtattcgcgcacatgtgacatgtgtaataacactacttcaataattgttttcttcatccagtttaaattcaattaaatccatggttctatatgggtttgaatcgaaacaaatcttccccgggattacattacagggaggttgtgagttgtgaccctactgacctcgtgttgcatatggggttgttgttttgccggttctttttttcaactctgaactccaaatttctcatttttcattagcacacttttcaaactgtaaaattatatattttcataaaaaaattatatgtgcaagttgtttaaaaaattcaaataaatctatttttcagtgctacagtccttaaaattatgaccaaagtgtgctcactacaacagagaagacccatgcagcttaattataggtgcctgatgatgtgtatatgaaatatatatcacccgtacatgttgcaaaataggaatcggatcaaagtgaacaaattatataactggtgggtaaagtagcacgcttttgttagtaaacaaagaatggtacgcagactaggggactgttttagtttattgccaaactttatcacgtctaaagtaggcagctccggttcttctggcaaaacgtttggcttataactgcaattgtagcgtttttagatttgcttatagactcaatttgcaagctgatttattttggccataagtgtggcgagctttttgtcgagtgtcgaaaaactatagcttgctaaattggtgatatatgctgtttggcacacaaaataagcaaatgaaccaaccagtccctaaacactattcgtataattcgtattataattatcattaatgaataaaataagcactattagtaaatacgtgttatcactggctcgattcgaaagtactctagttgataaattttttaaactaaactattcaattttgaacgaaaactggcctcactatatatggctcgcctcggctcagcttgctagttctcgttaacaaacaaatagttgagaaaatttaataaactaattttaataaaggccataaaaggcaaacatgaaccatgcacacgtagcgaacaattaatcggcaaagaaacggaagcggaaaaaaaacataaaaccaaaaccgaatatttgaactcgccggaaaataatgaaaacaaaaaaaaaacggaagtggatggcgtgggtggtaccgtcgcgcggcggggaggccgacgccggcggggtagcagttgaagtcgccggagcggagcgcgtcggcgacggcgtcctcggcctcggcggcggtgcggaactcggggaacacggaggggtcgccgtgggcgagcggcaggacggggcgcgggccgcggtcgtcgacgctggcgctgatcttgtaccgcaccgcccggatgctcatcttgtcccccgccgccgccatcgcgccgcccctcgtcggcgccgtcagcctccactccttgctgctgccgtcgctctcgccgccgccgttgctgctcgccgccgccgccgccgtcgtcggtgccatggccgtgctctgttttttgttggtgaattccggtgcagaggaggaggtggtggtggtgcgcgtcggatagctagtgccgctatatttgtaggagattctacgggtgtgggacacggactcgggtggggcacagcagcatgaagcatgcatgcgcgcctggtgcttggtggtggtgcacgaggagtatataagccccgttcgactcgaattagatacgaatgcgagatttttcggagcacgccaaacgagataattattataaatttatttataaatttaataaataaatttatttagtatttttatatattttttaaaaaggttttcgcacgaaacatatatttaataaacgtgttaatgggaagtgagataaagatagaggcccattgcgacctgatcgatcaatgttggtcagacgcaagccccggcaacattttggcttatttttggggaccgtttcggactcttgtggaccgtatatcgtcacggaggatgcggcaaagcatgatccatgcatgctatgcggtggttctcccctgagctgagtgacgaatgcttgctgctattctttatggaaaagaattatgtgaccattgcactaaggctatccccaatccttcatatcatctagtatccataacattaaatatattgtcacatgagtaaaaatctgatgtggcaagagagttaataagtagagagataaaaagatgaagaaactatttctcattcaagaaaccatctctacacaagaaccaagaataaaaataaagagattggttgataaaatgagagagaatgaagatgattggatgaaaatttaatttaaagacacaatccattggatatatagtttatatatatactgtctaaatgatatggtaagtatggaaagttggaaactacttgatagtttctgagtaagactgagttttaggcggtaacttcaaccaacaactttcttatttttggttaacacgcttttaaacgactaaacaaaattttttgtggaaaaaatataaaaaagttttctttagaaaaataaaatgaatctaaattttaaatttataatagctaatacttaactaatcatgtattattgagttttcttgtttcatttgcgtctgaaaatctccatcaaagccaccctaaaatatgaggcctcgtagggtgtgtttagtttgaggataagaaaggatgggttagacccatccgtattatttagaattggatgattccattatctgtttggcatgagggttagactggtctcgtcttttcttatagatgggaggatgtagtccacttgtcagtgagagagaaattatgttggactggtctgccaaattttgaggtgtgaagctcatccaaaccttggaatattcctttttggaattaactcatccttatcaactattaaataatcatattaaattataatgtattaggacatttcggccaatacaattgtaaccttttgggtttataataaaaaaatacaataattatattattataaaatggatcgttcacctcaaaataagtgcacctaggtaaaaggtatataagcgggtttgcaagcctgcccgcttgcacccttacacctaggtaaggatgtgatacactagacctatgaatctgtacaggctattcagattcgtagttcatatgttacatccttacttaagtacacttattttggaggtttttccctctgtgccattaagaaagatggtgcctgcttctgtgccactaaaaagttcgagcctccctctatgccatcgtcaaactttattgcgctcttcacaccattccgtctgtttttggtcgtaacggtgggtaactgcacagccaaatgacttagttgtccttagacttgagacggcacacagggaaaaacctgctctctctttctctctttgctttcttcgtttctctccctcgcgccttgcgttgcttggcgcggcgaggctaggtgcagcggcgcggccggcgatcgggccgaggcgacggcggcccggtgtcccggctgggcggcggctgggcggcagtcagccctacgcggccggtgcagcggcgaggctaggtgcggcggcgcggccagcgaccgggccaaggcaacgatggcgtgagccgtggcgacggcggcgcggtgtcccggctgggtgacggcgggcggcggcgagccctgcacggcggcggcggcctgaaggtggccctgcagcatcggggaagaaggccgggacaatgaggaggatgggggaaggccggcgatcgggccaaggcgacggcggcgcggcgcccaggcgccggtcggccctgcgtggcggtgacctctcgatatctctcgcgggggccacacggccagatcgtcagaggcgccgtggcgggcccgctcgttgccgccaccaccatcgtcatcatggccatcgcgttcaccagtcccatgttccaccgcctccccgcggaagacaacgacgcgccggcgtccgtctccggtagtagcgctgacactgatgaacaccgtggcctgaaggtggccctgcggcatcggggaaggaggtcagggcggcaaggaggatgggggaaggccagcgcggcggtgatggaggccgtcaggctggaggagccggagcggcgccgggcaaaggaggaggtcgggcgccggttggaggggtggccagcggcgctgtccgctcggctcggcggagacgatggcgacaagggaagacgaggcagacgttgatgccagcgattgaaatggcaagaacgatatttttcttgcccgggcccacatgccagagataccaaacggttaaacctaaacagaatagcgacggaatgttgtggagggcgcgataaagttcgacgatggcatagagggaggctcataagtttttagtggcacagaggcaggcaccatctttattactggtgcacagggaaaaacctacttattttgagagattatcatgtaactatatttaaaagtggtactccctccatcccaaaatgtttgacgacgttgacctttttaaaaatgtttgaccgttcgtcttatttaaatttaattattaattcttttccaattatttgatttattgttaaatatacttttatgtatacatatagttttacacatttcacaatagtttttgaataagatgaacggtcaaacatgtttaaaaaaatcaacggcgttaaatattttaggaaggagggagtagtaacgaaagaaagtatgacgtagataaataagtttttacctatacataatttaattatcaactaagccaaattcgatggaagaagaactcatgcttgaaacggtataacaagtggcatgttaatttcgatcaattaatattggccagaatttgaccaaaacgatggagtaggaattaacagcatatagaccagaatggatatgccactcattgcaaatcattctaggtggttgaatggtgcatatatgtcatctactccctccgtttcatattacaagtcgtttatctttttcctaatcaaacttctttaagtttaaccaaatttataaaaatatatagtgatattttcaacccaaaagaagcatattatcaaaatatattaaatgttagatttaatagaactaatttaatattttagctgttactaaatttttttataaatttggttaaacatttgactaggaaaaaaattcaaaagactataatatgaaacggagggagtagtcaatgctaaaacggagttgataagctgatatctgctcatacttgtaaaatattaggaataatctaaggcatcctttgaatcacataaataaaaaaacagataaataagaaaaatatagaattctgacaggaatacaaatatgcataggtttgcaaaacacataataaacataggaatgaccatttaattggaccgtaggaaaaatacaagaatttgaggagagataaacactcaaatgattttttccattagattctacctcatgttaaatttcctccaaaatttacatggaaagagacattccatagaaattttataagatttcacagggttcattactgtagaaataaagctctctaaaatttctgtgaattttgaatttccttataatcaaaaggggactaaaataggaagatggtaaaaaaaaattgataagccgtgctaaggtcaccaccatcgtgtacccgtcaagtagaaggggctccagtccactgggccaagggcggagcttcatagacaccatcatgggccatgctcctatggtccccaactttcctgaaaatcaatgaaatcattttttttatgacatcagtagctagcccccatggccaataaattttacatattagcccctcaaatttctctcaagctctgttactggttagggacatttccatctagcaatggtgatttacacgggtgaatttaactatttgccactattgcatttggcaattataaaaataccctcttagttttcagcttacaaatttatcactctacataggtgacttcttaactatttgtcacctttatctacgtggtttacaaacatgaaaaacaacatgggacccacccgccagcctcttccttgtgtccatctccctctccgatgcacgcgggcatgacatcatgggcgaccgggtgcttggccaacctgacgcgaggtacttgaggcggacacacacccaagactcttacacaacaacgaagaacctctcaatgatgagcaggtggcgaccgcgccaccaaggtggaagccctacatgtgcgccacgatgcatgttgacaaatggcagcgaggaggaggaaggcacgttggaagccgtagaacctcatgcgcagcacgatgctctatcctagcgtcacgacaacgccgtcgtcgttggagtaggtccatcccgtcggtgtgtgtcggagggggggatggagagaaggggaaacacagactcctggggatagagtggcgagcgtcatcggcggcgtggagggcctacccctcatcgtcggtggtaggggtgagcagaaaaagactgagatcgagaaatttggtcatcaattcgttcctaagtagtgaaagacagaattttgtttggtcaattcgattagtctcatcggttaaccgaatagattgaaaagactgaattaacaaaaaaatgtctaaatgcaacctacaatccactaagttcaataggattaaactctattttttacatttctacttcttctaggcatgcaacctaataaaacctaataagagtctttgcttatagaccgagaccgaatttgtcggtcctgacatttttacgttgaaatttggtcttcactttttaaagaccgaaataaccgaaagaccgaaaaccgagaccaaaattttcggttagaccaaatgtccacccctaatcggtggggctagtgctcgaaagctactcactacaacggtggttgttggggtggcaacagcaagatgagagaggggtggcacgggaagggagtggtattgggggtcgtagcgactagggatgggctgggggtcgtggctcaagctcgccgtgactgtacaaacacgccaaagaagaaaaggaaggggagagtgggagaagctcacggctgagtcccacgctgtttttttcccatttgtaagccacgctgacgtgccacgtaggcaaaaaacctctttagagtggcaaaattgtaagctggaaaattgtaagctggaaaccaagagagacatttagataaatttatctactgtgatggttcccctaattcctctccatcaccctgacaggcaccatggtggcgaagggtgtctatggcgttattttatccaactctactctagtggaatggacagagataaattcgggtgctttggatattttagaaaaaaaaaactatcgacggtgaagacacaaaggaagaaaaactctttatatgatgataaatcgtactccctccatattttaatatatgacgccgttgactttttatctaacatttgaccattcgttttatttaaaaatttatataattatcatttatttcattgtgacttgatcatcatcaaatgttctttaagcatgacataaatattttcatatttgcaaaaaaaaaatttaaataaaacgaatggttaaacgttagtcaaaatgtcaatggcgtcatacattaacaaaatacggagggagtataattcatgtttatagactgcaattactggtataaacaggagatgtagagatcatgtgctgatgcattttctggaaacatctcaggatcatttgtgtagtatgagtatctatcaacagtgtctttgtacctctgctacacgtttctccgtggagacatggtgtgctcatcgttgcacttgaccttgctcatctggcaggcaccacgcaagcacttatacgtcagaatcatacagccaattcattgctgacaagaactaggttttcacagcacaacttggcacggacagacaggaactctcacttgtgtctactccacaagacacttcgattgcgccaaagcaagagcgaaattccacacttaaagttatgagcgatcattatccttgaactcttcaaaacaagattaacacaaacttatttacaagcactcaagtctttgaggtcacgtgttaccgaatggcgacatatgtacagtaccatggcggcgtagtgacatcaaacagtcgcattcagagcagaccacataactgataactacatgatgaacttacgccaagaacctattgtgacatatatctatatcacaaaaaaacatagataatgcatgatcagctgctaaataagtagtgttgcaacttacaatatcaaggggtgcactatactccgccaaggttaatgatagttcaccgagtcgacaacatcaccaatccatccaggatggaacttttattcccttctgcttgaagccctgtgtagatgttattagtgcaacggtactgaaacagggtaaattgcacagaaaaataaacaatataaattttgaaattttaatatctgcaggaatcatcataaaacttccctactcaaacccatattaatatttcatgttctttaatgaataaagcattttatttacttgtaatgtttttattttaccatatcattaattaaagaagctgccaggaaaattttctactgtggtgcatcgaacaattatcttatctggaacattgtataagggtgatatcaacctaacaaacacatatgcaagcaaactcaaattatttactactctcatgtgcaagcaataggacactgttatctgcaggtaattgttcagtcacacagttctatatttagcttccatagtatgaatgaatacactacaccatgccagtacatatagaaatatgtagagactttgaatgtgagttgttgaacatttcagaacacttaacagaacaatagcacttggcaattgcatatcttggaaattcttaactagttaactgcagcagttgaagatcatggcagtccttaatcattggtcaaacccaacaatgttttcattttttttctcgaacatacaggagagctgagcatcgttatattaagaaggaaaagagtccaaaaggactcaaacaagcccattagggcagattttagtacaaaacggcttgccaaagaaatacaaaaggactgcgaccatccatgaaatagtttagttggaatgttttcatgttttcagaggaatattatctggcgaataatcatcagctaattctgtggcaaaagctacgcaaagataggatgaaatagttagttggaataattgggcataaagcattcataggtggctattcaagtctgcagttatatacccaggcttcctggaaaggtgggggaaactaccaagctgaagtgaagtaggggcacacagaatttccagtgagtgctgaattggatataggaaagaagaccaacgtgaaagcactccatttggccaatactatggttgtgtttagttccacactaaaattggaagtttgaagaaattggaacgatgtgacggaaaagttggaagtttgtgtgtgtaggaaagttcgatgtgacggaaaagttggaagtttgaagaaaaaagttggaatctaaacggggcctattttatattgcatttattatccctctcataaggtattttagttgcgcgtcgctttttgtgatgactttttggggtcttgaggggtccttttggatccctcgtttgtacatatttcttcttcttcttcttcttcttcttcttcttattaataaaataaggcgcagtcctcctgtgtttttgagaaaaataaggtattttagttttgggtatattattctagaatttcccacacagttctctttaccctggtgtctccaaaaattatatctcatctggaacatttttttttaaaaaaaaaagtaaggatgaccaccagcagaaacctcctgtcaggcacatgtatttaaccacccactataaagctaataagtagttcggattatgcagcagtcgtacccacaaaaatacagcatttctgcattagatatatgttcagatgaatgtcaaaacaaatgataatatatactttctctgagactctgattccatatacaaactgtttttatacttgtgcacaaggattaagaaagtgatcaaatgagttcgttgcccttcatttatacatagtgggatacatgttcatgagtgataatatgtattcaaaaaggacaaaggaaaaaagagatagtaaaaggtgcctcaagttattatgacttatatttgaaaaagagttaggaattcaaagatgactgaggaagtataatcttacctttttcacatctgaatatagatcttcaacccttttctctgtctgctttgcaaatgaccacattttgtatatactagactccatctttcttgattcatcaattagaatttgaacctgtaatcatcgtacccatgatataaacaactgaacaacattcagaatacaaaagaatgaatgatggaaaagcacaataataggaacagttactgtccagttgtcaaagtcaaaacaccaaatgcgtgatgtatgaccatctaaatgccaaaaaagctatatggcacaggtagataaaaatgtacacatttacatttaactattaactatacttttctaatgtttttactttttagtatataacaaaaattaaaaagcatagaaacccatattataccatcatgatcacttagagtagtatagtaagaaagaaataggaaatcagatcaaatcttccaatactggagagaatagatataaattactacctccgtttcaagttataagactttctagcattgcccacattcatatagatgttaatgaatctaggcacacatacatgtctagattcattaacatatatatgaatgtggacaatgctagaaagtcttataatatgaaacggaggaagtacaaacaacaaaagcggcttatattttaatttcatgtgtaggatataagttaacatcatgacgatatttgaaggcaaatagaatggcaaaaaaggccaatagaattccaacatagcttggaggagaacaatcgttatgctttgttagtaaaaagctgcgcaaaagcctttgatctaaaagaaacatagcttggaggagcaatcgtgctgtcgatggataattggtcatagaacacctcactattgcctatcggtaacatcatggccagaaaacaatatcgagagcaacaactaccagttcatgcaatgagaccttatgtacaagcttacagctagggtcactgaattcacaagttctcatctctcttctcctcttccctccattgaatatttgagtgtcagcgcaattgcaagacactgtagtcatcatacgccaccattcacaaagaccaaggtggcatttaacataaaagaattaactacagaacggctttacattgcccttattaaacggcatgatacaattaggactcaacccctttcatgcattaggttaagggtagagagtagaattatgactaaactcttggttttctcgatagacaagcactctaaaatgccatatcctaattaaatagacaaacattgtgaaaacaagagtataaatttagacgtgcttgaatttgaaaaattaaaattctactctcatataacaaattcaaataaattatatgcacaaaggaacagtacaatgcagcttctaacaacctcaagagtcaagacaatcaaaataaataataacctagatagtgatacctttctcatatctgaatgtagaccctctactcttctctctgtatccttagccaatgaccataattcacgaacattagagttcatctgtcttgattcatccattagaacctgaaccttttatcacaatgctgatgagatgaattaatcaaaatacctccacccccaaaaaaatcataatagctcagaaaagtaacacatcaagattgaactagaacattcagaatgacaatattgcaacacatcaaatttatttaccaaataagatagcacaatactgagtcttcatatgtatttaggcttgaaagacatttttaaaaaaatgtattcaaatgtgaggtttctaatctcagatgaaaaaacacaataaatcaaatgcatgatcaaaaactaatattaataaaatgttatagaattggtagttactcatggcaatcaaaactgatgataaccttaccatattaacatctgaatgcagagcgctgactctattatctgtatcctttgccattgaccatatattgtgaatattggagttcatctttcttgattcatccattagaatttgaatctgtaatcataatatccatgagatgatcaccttgaaccagatttcgtaatatattatactataataattataatgaagggctctcaaagtaattcattttgtgcaagggcaacataaataacctaagattggtacaaacaaagctaagcatgctatgagcatatgctcattggtgcaagggaaggcatggaaattttacatcacccgtacttttctgattggtttgcagccggtagtgattgaaaatactgggagatattaaaaccattataaagtgtaatcataggcaagggaaaatatttcataaatctacaagttgcattactggtagtacgttttatgtgtaggtttcttaacttactcagaaattgtttcaccagatcatatggcatttcagtttagatgaatgctagtatttgatgtttttcagtgcttcatgcttacaaaatgtcactatttactttgtaatccatttttccatactcatgtactcttaaagtgtttccaaataatgcggttagttactccagttgcaatattagttaacctaatttagttcaagggactggcgtttgagtgtaacagcttcattcacgattggaatgaggttgctgatgctcaagaacaaccttcagcaatgcaaataggaatttttatcttacataagatctctggctgaaaataaagaccaagaatagaaacagtatcctctagtttgtatgtaacacaaatactgcaaactcaatgttctagcagaaaaaagacatgataatcctctcaatgaagcatatacatttgtatgaagaaacattgaatatggacagcttgagaaactttatacatgttattaatgtaactgtttctattggtgattggtgacacataacatagttgaaaaagaaaaaggtgcacaattttacggggccacacatgtagatagatagagagagagagagagaacctccttttccattgccttgatagtattatcagaatatgagccacaaagtgattcctacaagattggaaggcacaaaagaccaatgcatgatttgtaagcattctgttatttaaccaaaattccaaaagtaggaaatgcaacttatcagaatgacagtaaggtaccaggtataggttgttcctaggcgcacgaatccatagatgtacgaaaatacaaatgtaactttgtatatatatatgtgtaatgttttgttgctaagtgaagcgcatggtattactaattaagtgacctatttttagtcatttgttttggtcttccttcctacacaatcagacaaagaaatgagtgtttccctgctccttgttacagaactgtccctaataaaaaacaatcactggtcttaatgggaggatcaagaaccgtcatcatgcatgtgtagaccgtaatttttgacaccgtaactctgtaagcaaccaattacagaactatggattatggaaattgatatgacaaatcctaaaagaacatcataccttgatattctcatgctcattgatcagggactgaatatccagccccattgctctcacaacctctccatcctcctccaaaggaccacttttcccatccaatggttttgaattgttatcccacatagactctgtgcgcgcggcataattcagcaattgaccacacagatcaggccacgaatagaagaaattggagagaactcatacgcgatattaaaaatacattaatttctcaggccacgaaaagaatcgatggaggggtatgggtcgccgctaattccccagtccccacgtacccagcctggcgagctggagcttcagctgctcgatatccgaccgcacctcgccgcggaaggcaccctctccgtcatcggggacgacgacggaggccgcggcgcactccctggcgtggtcgcgcgggagggcgaagatggcggcgaggagcgcggcggagagcgcgaaggccgcgcagggacggcggaggtcgccggcgctgccggtgaggctgaggcgggcgaggagggagagaaggcggagggggaggaggaaggcgacgacggcggcgaggatcgccgcgtcgatcctcatggtggcgcggtggcggactggactggagaggtggacgcgacgggtacgggcggagcagaatggttgccccgtgggctcaattctgaattacactggttttgtagtgtaggcccaattttatatcggtaccaactagcaaaatgccctaatattagtaacgaaaatgctacacaaacgaccggagcgtctgactttttggatgacccgtttgattcagcttagaattattataatctgaattattagaaataagctaaaaaaacatatagcttattatgatatattattataatctataagccagattactatataatttagcaatccactaaaggtgtttttttagattattgggtggctaacaactaacaaacagcttataatttagggaaacaaacaactcacagattattctatgttagcttttataattcagcttatagtaatctagttcaataatcttaagctgaaacaaacagtgccgcgcggcatcaacatcatgctatacatcacatgaagcctcacgccgtcatgtattgtgctgctctgctgtttcggtcagtggagaacccagaacagaaattaccgggggttcaatacgtactaattatctatttttttaattgtatactaattaacatgatataacttagtaagaattggataatttacccggggttcgaggatcccgagaaactacacgtaggatcgccactgattttggtcgtacgccagtcggatggagaagtcgtacgtatagcaaggttctattggtaactaggaatattaactagcaaaatgcccttacacgaagtctccatcagtttattagtgaaaaaataatttataagtaaagctttcatgtatgtgtccttgacaacttaaaaataaaactgaaaaagaaactatgttaataaatattaaaatcaacttcaatattttaatttttggcattggtctataagttataaggcaaatgatgaggccctcttttttctttgatatttttctttcggaacatttttcgctcttgttttactttttttctctttcgggatatatacacaatagttaaatcagttgtattcgttgacaagggtgttactacattgctctacccacacatggttaaaggtggagtggagtggagatggctggtgtggaggtggtaaatacggtgttgagtggtgataagtaataccctccctgagtaccttagggcatatgtagtgtttatttatagacaacgtactatgtgtagatctcataacaaaaatatatgctttgtgaaaacttctgtaatgtatataaccacagggtgccatggagagtgagacccactgtgattaacacaaggaagatgtggtattgatatattcatttcagagagcaatggcatatggcatgtgagttcaagaatacaatggccggtggttggccctaagctaggagtggctgaaaataatcttatagtgtatagagtcggttctatcatcttctctcttttatagaaccctctctaaatgcaagattgtacatgcttttatatcatccttgaaggggatccaagtcttttgacatttggtagcccgatgatccattccgtgtcgagctggaccgggctgccttgatggtccggtccaacaggaggttgggggaggggggaggggggatgatgctcagatgggttggactacaaaagggaagaaaagatggggaatgaggattgggcccaaagagcgaatatatttagagttaccattttatttgagtttgtgtgtggatgatttgaacttggatttagttttcatatttcctgaaagggtggcttattccattgacctatattgggagataattactttccaaattttaggaatttcctttacgtagtttcatggatttaataaaataaattgattccttatttagagttacttcattttctattggacccacgattggtatagatatttgggctttttatcgtgtatgtgttagcttattagttgtaaccaaaatttaaattgtgaaacttaactttagaattgatttgttttcattgccaacaatgaattttaaaccacaaataatatatgtacaaaagtcttactaataaattattttgtatcgtatattttcctatgacttatcaaccacagctcaaatgattagagtttactatcagatgccattactatagacaacagaagcatctaataaatccaaataccctcttttatgactatcaaccttcaaaactcaggctaatggtgagccttagatcgagatcaaaagtcatcaagcctagactttggctcatgcttattttttttacttgagctataagaataacaagttaaatcttgcccacatatgacataaaataatatcgacacaacatccaaactcaaaaagataacatgccaaatctcaccaacatatataatccaaaacataatagtactacataataccataaaatcaagaaatggttatgcccaaagttctataataacatatataataattgaaagacaggacgagcaaccaccgagagaccgtagtgtgtggatattacatgtgtgagatgcttaaggttaatgggagttacacaacaaacccggacaatataaatacaaagatttgttctttgaaaaatactatcccatagtaatgcagtttattaatgcggacatcaaaatttctaacttttattttcatatttcttttatatattcttgaaattcctcccgtagcataacaattcgacaaggaaacactactttatgaatgtctgcaccgatatgtgccactttatccaacgcgagtgttgcaatgcacttggtttgttgtttgacgattagagcacgccatcgtaagaaaacaaatacaaaacccttcaagagtagaaaaaggaacatatgtaatgaaactttattgttatgcgatccgagaatgatcatttgtgatgaagttaacaaaacaatgtttatatatgtcttcatttgaacatatttaatatttatatattgataagtacacacttctagagcatatagtactagctactataaaactaagttttcaactggaaaaatattttgatttataataggcggggaaatagctatctcaagcaaaatcacgagaatattcatggatatatcaaatggttttctcaagatgatcatgatgatgttatcacatatctcctatactacatactttgttataattacaattttgttttttcccattgtaacatgctagtattgtactaatatgacttaattaaacattatcgacacaacatccaaactctttttttttaaaaaagataataagccaaatctcaccgacatgtatcacccaaaatatagcactagtacatattaacaaaatctaaagaaatggttatgtccaaagttcccaacacagcaatgacttttatacaacacatgccaatccattttcccagaggagccctcgcgtcggcaaaaccgacgtgacgtggacaccctcccgctgcgtccttcctcctctttcctctcctcccgtcgagattgcaaaaggaaaagaaaagaaaaaataatcctccatcacccaccgcatctccgctcctcgaccgcgagagaggagaggagagagagagagagagagagagagagagagaggcgttgcgagattcatcaggcaggcgcaggagaggagaggagaggagaggagattcattatgggggtggactactacaagctgctgcaggtggagcggggcgccaccgaggaggagctgaagaaggcgtaccggaagctggccatgaagtggcacccggacaagaaccccaacagcaagaaggaggccgaggccaagttcaagcagatctccgaggcctacgaggtcacaacaccttcttctgtatctatatgcgcattccccatcgttcgcgaatttgcgcctctgatctgtatatatgcgcccggtgtgctccctagttgatgttggtccgccaagaatgggggctggtatagagggtgcacctaaacgagagggatcaatcttacccccatttcctctccgctcgccgattgaagtagtttttttgttcgccattacctaaacgaggttgttcttgcgatgcgatgttgttggtaggaagatctgggtgctgcaaagcaatgctgtttgatctgaaaatgctgcattttttcccggtgcttgtgggatccaaacagagcaatgtagtgcctttgttactcaagagacgattcatttcatgcaacaatatggaacatttgaccttaggttgggaacaatggccttttgtatttctggattctgatgttattgtgccaccttctttgttattttggaatttgcccactgttctttttgatctttacgtatgttttgtaacttcagggaatggcatgttatattcaatttttagaacaaaaattgctgcaggaggtattaatgagctaattatgatgcagctcatactggaaatttggaaccctattatgcactttattattgactggatggttatggtataattcatattctttgcatgatttcaggtgctaagtgattcccagaaacgagcagtctatgaccagtacggagaagaggggctcaaagggcaggtgccacctcctggagcaggtgggcctggtgggtcttcatactatgggggtgatgggtcgacgttccggttcaaccctcgaagcgcggatgatatatttgctgagttcttcggattttccagcccattctcaagcatgggtggcatgggtggtatgggtggaggtgttgacaggggcatgcggggatcaaagtttgggatgtatgacaatgatatatttgggtccttctctcagttccctggtgaggcatcaatgcatgctccccaacggccccagaaggctgcaccaattgagaaccgactgccttgcaatctagctgacttgtacaaaggcaccaccaagaagatgaaaatttcacgggaaatattagattctagcgggtaattagctctattatcatgtcattttaaagttattccttgttcagtactggattggtttctgaatatgtatgtggcatacgtttagtatgtataaaaaagtacgaagcattttagcatttcaagtggggtctatgaattatgtgaattaccatggcgtgtacaaaagtaaagttctgcacactagttgataatatggcaaattgcacatgattatggttgcctgttatcaattgaatagatgtcacaatctaggtctaatgtatatcatcattaccttgaaagcgctgttttttttaagaatcagattaaggagatatcaacatccttttactcccttgtcaaattggttgcctagggatgaatgagaatgtagtgactaatggtgatagtatagagttcgttaggacttctgttcaacaggttatatttccttctaggactataaacttgacatatttcctttgatatcgcaatgctttagtcttgatattgaaatagtagttttgtgctcattcaggtgggtggtttcacacgtctattgtttttgaaatagcctataacaagtcatcccatgttagtgctccgctagccttctatgtacatttggtcatcagcatgttgatggatcttgtctatgatgttgaaattgttgctgaatggacacatttatgcataggtgttcttatatcatacttttgacaacatcatcttttatatttctttcaatattgtgtaaattaaaaatatgctgagaaacagagtcaaatgtgtacatgtcaatgttaaaccaatatcattttcaaaaatataagatatgtttataatctcccatattattggacacaattgatttttcatctaccattatattaatgcagtattgctacagatttttcacttttgagtactcattgtgttaatataccaaaatgttgttttcagtttcagttgttgatgagctatactacaaataaaagaaaaactgcattaacgtgaaaccgtgccctcattgtttaggattacgctgttatggacagcactatgtggccatatccgtaaggtggtttttggattttggatatgcatcttgacacattaatgtcttccattttgaccaaatggacttgtttttggaagttaaaaacctattggacaaagatttgttgcgtaattgttctggttgcatttaagcgcaacaactggtttggaagccatttaaagttcaggcattgcctaattggcccaaatgtcatcatcccatttcactcattctgattttttcgtacataggaaacacttggtttttatatataattgtttcaccactcaagtggaacactttatttaatacagtggatactcatgacatgaggttggcttatcaatttagcgaggcttgttattgtttctgcaacttttatagaaattcttattattagatttacaaatatcagcagtttcttattgtcaccacatcaaagatatattttgctttggtttctactcaattaatatttcgcaaactggccaaacataattttgtgttgtggttctgtttctcttggttgagtatgagtcatattattccgttaggatcaagataacaaaaagtagatagcagagttgtagcggattgtgggggatattgtcggcgttacattcctaaagcggactataaaaaatactcataaatcataagtttaacttaaccatgaacatacgatggcatttatcataataagacatgtattagaagtacactgcatacaaggacatcaatcataagtagaactggaagatgatctggtatgtatgcatagctacattcatgataaacaattatatcttagttgcacaggaacagcagaaaactcatgcatgtgcaagctagcaccatcaactttgtatttctgcatgtttaacctgtctaggacctgtaattattgaaattgactgggcttgaaattactatgaaagcctgctactgcaatagtggccgctatttagtactatgcttcggattattttgagtgttactgttgccttccactaatttccatttttttgtcatatgggacatgctcttatccagtctgtttcattctgtgtttatcttgtgttgtcttcaatatttgatatgccatttttatatactttgcaatagacttccatttggtgccttactagcgtatttctgcattggcaggagaaccatggttgttgaggagatcctaacaatcgacataaaacctggatggaagaaagggacaaaaattacttttcctgaaaagggtaacgagtctccgcatgtgattcctgcggatattgtattcgtgattgatgagaaaccacatgatctgtttacacgagaggggaatgatctcgtcatgacacagaagatttccttggctgaggccttgacaggatgtacagttcaggtaacagcactagatggtcggaacctaacagtaccaatcaataatgtcgtctaccctggctacgaggaggttgttctccgagagggcatgccaattccgaaggatccatcaaagaagggaaatcttaggatcaagttcaacatcaaattcccctcaaggctgacgtctgagcagaaatcagaaattaagaggctactagcttcttgaggaacacaatataccgttaggttgtctggttttttgggtgcactggggagaccaatcagatgttaagctgggaaatgtgaataccatccaaagactcattttttgtgggttctggttattccacctttgtaacttaaaattgtcaattttggcagaataattcatcaaaatagataattctgtgtcaacatgccgtgcttatgtgtgccatctcctactgagcagaggctatcaaaatgaagccgcagttccaaactctgtttttttttcttttttgtactggactgcagagggtacccctggttatattttgagtatttctcgtcctagctgggccaatcttaaaccatgttgacaatgggctaatctcaaggcatgttgacgacggaacagttggtggaggagctagaatattgtttgaaatacatacgatatgtatgtatttcccctattatatgaaaccaaaggctttctgtcatcagtctacacctgtacggctgtacatgcacattttcggttgttgcggtgttgctgcctgaacgtctgcacgaagagcctgtcattttcaccgcgccctgcttacccggttaccgcaaataccagtccacagtttgcgcctggcatcttatcacatctgtatgcactagatatatttaccctgcatacggggccaacatttacgccggcactaaacagcagtggtaataacacatacggcaaatcgggcagtgatcaggcgatagttgatagccagccaaacactacatttgtcaaattagcacagatgtacaagcctagcaatcttcacacaattacaaactagcaaacgcaatcctaatcgcaaaccaaccatcgatcaatttacaccaagatacaatcgaatcagcaggaccaccaaatgccctaaacaatcaggcatctctcttgttaaatataacctacttggtagcatgctactctatgtactaataaacagtaaatgcacattgcaaactgaaacgcttccaccacatacttcacacagctcagcaagcataaggtcaagcatttctgcagataccgggggtaatttacttgcccaacacaagcttcttatagagcgcaagtatatccttcttgttaggattctttaactctagcaactgcgctccaaatccatgcttggtaagctcctctttcagctttgcaatcgtgagctttttatacccatctggattgccatctttagtgtctgtgctgactgtgacactgtcttcacccatatgaacagaaccgccatcttcagattggaaatgctttagagggctagtattgcttttagatctctttctgctcctctccggacgatcaatatccatatcttggaccgactccatgcctacttcattttctctcaacctcttgccatgagtggtggtacggagcttgctgtccagtgcagtctcaacaaggcgaactgatgtcagctcctggtggagtacatcaagtttgctttgggtagactgtagctgtaaagacaaggcttctgcacgcttgttcgcttcagctctagctgcacgctctgttgacaaaagagactcaaggacgtgcacggtactggacctctgttcattgctctgtatcattaattcctcgatttctttctccctctcggcaaccctactctcaagcaaggcaaccttggacaaggcatctgtttccgatttatgcatcttctgcacttcatccagtagatttactttctcctgctccagtctgtcaacttgtctttggattctttcaatcactgctaatttttccattgacaagcgctgtgcctcgtccttctctttttgggctgtaacggcctcggttcgagctacatcagacaactcggtagctctttttgcttccctttctgcagctttgtatctttcttctgcttcatcatatttcttgcattcagataagaacttctcttgaagatggttcttttcctgttcaagcattcttgcttgcttttcaaatgataccgccctgtctcttagaaattctaattttcctgttagttctcttatttcatccttcaaggctgcagtttccttgttatggctttgtgcctttgattccgctacctgaaaaaacatgtcagcattagaaaactagcactcatacaataaatgcatcaactaaatgaagtggttgaaaggtagtgatgaaggttaagtgacctgcaagcgctcagccaacacactttcttcactctctgcatgtctgatctttgcaactaatctcttcatttcttcttcctgtcaatattaagatgctatcagcatatataccgtcttactcaagcatatgaaacatgttgtgggtacggcctaccttttcctccagatgtgaagcaaactcagcccttataccactctctctttcatgggcaattttgttaatttgctcttgcacagatgctaatctctccaatgcagctttagcttgtgcagcagctgtttcatatttatccctccactctgtggcctcatcctgagcagccgctgcctgttcacgggctgctcccaactttccctctgcagagctatatctggactcaagagttgctagttgagaaatgaatccatcttgctcagccttttgctgagtaacatattgctcatacttcactctccaatcagtgcattcatggcgtacaagatcaagttctttagacaagctcaagcagcgctcatctagtgtgctacacttggtcctcaggtttgcaagatgagcactgtgatcttcagaaactcgttgtttttcacttatagcagcttcatatcgttttagatattccgatttatgggcctcatttgcttcaagttgcctttttagaagctcaagctgatcttcatttgaacgatatttcaatgcgaaggaagtcctctctgattcagcttcatttactaacttaaggcagagatccaatatgggtccttccaaactgcaagaaaaagatgtagtaacttttagatatgcttgctaagcaactagttgaccagttgaccaaaggatccatattcaaatgatggttaattaacaggcttgataacacacaatgaaaatccagaattacccatttaactttaacttgacaatagatttacaaaaagagaaggaatgaaaataattgatgtcatggattcctgaacaaattactacagctgtattgcactagatggacggtagtattaccacaattaattgactggaacacaattatattctacagtttgggtatggagcatctaatattgcaccactcaacacatgatctaacatgcaattgccattcgagatttcaaattcaacaacataacataactaccatgaaagttatcagttgttgggacagttgagacagcaggcaaatttctacaaacaacttgatcaagtcagcagaaactaaggtggctaaatatagaaaaataatattttgtatagtctcacttgaccaaaagataggtggcgtattgtagattctcatccagttcatctccagacaaaagcaaattcaaaatatctgtaagtgcaagcattaaaacaattaggtaggggcaggaacaaaccactgtcttaaaaaggctgcaagcattctccatttgcttgggccagaacaagaagtttcatattcagtgagcaaactttccaggacctgcaaaatgtaacgtggtctctgcttgagtgcatatacagagtgaaataacaccagagcagcttccatgaaagaatgtcacggtaggaaacaaaagcttccatcaaagctactgtttttactgacatcagtgtatttactgttttttatgaacataaaattattaaagcaatggtcaacggtgtgtattggacactgttaatgccataaaaacaccaggtgaaaaataacataaggagtatcgagaataaaataatagtagcaaattagcttaattggatcattgacagtcatacttaaaagtaagtatggccacaagcaaacatccatgtcattagctaaatgcctgtgcttttgcattggaatttaaacaagagaacccccactgtatgctctaaagccccaaaagtcataataaaaatattcccattgtactcaatactaattatttcacataatttttacatgcatgtcaatctacatagctgcttttaaatgtgtttgtacatctgtctatagaggagtccacctactcactatttaggggtatcacatggcagttgtgctgggtgatggcagatgtcattcaccatcaccattggagtcttttaaaggagcatagatgtcggtacatacctgaatcacattagaaactttgactccaggagcagaacacgctgctcggagtttcctctccataatttgtatcatgtttgagcactgcttatcggcttctaaaaaggcattccttttgtattcctaaacaaatgtaagtccatgaaaccaaatgagccacaggaataagaaccaaaggcatcagtaagccacaatgcaatatttgggaacatacgaagaatgacacacagaagaatctcaattaattttacaggcatatatcatatccttagctatttggtataaaatgaaggtaatctttcctttttttttggggggtggggggtgggggtgggggcagcatgatgcatccattataacataccctattatttgatattttatcaacaacacaatgtttaatcaagaattcaagatagagatatatacactatacaaaataatctttagagggcttgagacttctacatgttggatcttatatcaataacaaatgtaacaatcatgtagtggatcgcagaaagctcttgcaagatactccctccatccacaaaagttacacctatttcacatttgggtttttccaaataagttgttcctatttgtagtctttatgcattcaagatttaaatgaagagataaattaaatgtttgattagaatccaaggagtcatctaaatactcattggttgcatgcttgcattcactcctccattttgtagcatccaagatgatttaatttttccttggtcttggtgacaaaagtaataggtgtaacttttgtggatggagggagtagctgctaattcttttctattttgggtcgttctgtttgccttgggtgaatggttgtgtgacaactttgctccgttcaatcttaaaacaatgatgcacaagtcttatgcacattgcctaaaaaataatcaatatcaaattgtgcactaactcaattgaaattctgtcacgctaaaggaatgttctcaactcacttcttgggtacgaaaagttgaatataccagcatataaatcaaaggctagtacatgatatcaattagaggaattaagcattagataggaataggatgaatagttgattgagcttaacaaaatgaaaacaagttgaagctttcttaacaaggtttaccacttgattactattaactatgttaatattaacatttaaggcaaacaaacatataaaagacaaaaaaacttactttctcaacatcatagtccatgatcaaataaaccagcggatattgttaagaaatgtttttatttacacctaacggtgctcttgttatttatgtgaatgactaagggtgtcattaacttcttgttcgatatgtatgattccacaacatcagattatgtttaacggcaataccagattcgatgtaataattagagtaaaactgcagatacctgaaatgtttttctgcagaagttgctaagaactttctcataatgcatacgggaagtgccagttccaacagcaacggtaccatatgcttcaagtgccttccttaaagcagcttcatgtgcatcccttaaagcatcctaaatgcagagttaaggcataatggaatttgtagcatgtgctatatactgaataaaccttttaacttacttcttcagcttgtttagtgcgatcaaaagctgaaagatagacctctgcagcagaatcgtatgctctacggcattctgcttcttcaacactctgcagtcaaatatcaaaggcatctaaactcaagatgatacaagtaggcaacgcagatctatattcatataattttaagtacgcattacaaaccacaccttactctttttatattattttttcaagctgcaaactacagtccattaaaaaattggtttcagagtatgatatcaacttgcaaactacatggttctttcataaccctaatgtatcagcatctcattgtcattgatgttatccatcatattagaatgtgcatccaatatgcatcactctactgtctagggccatggctcaagaatcaacaatacctgccaagaagatgatatagtaggtacagctccgttgtttattgcatccaaaaaagactgtgttacaccagcaagtacaggtccagtcatgactgtaccagcaacttgctttggccttgtcctctctaaaatgaacctagttaattcatcgagtcctgcttgaaattcaggccgcaatttctctatctgcgaacaagacaatggtccaatttaagtggtgcccacagttctttcagatatgttgtgcacacttatttcagcatgcatcccacgggaagggcgcatctggactttgggatagaaaggtgggatagagattggaatatggggtgcattatgactcgctccatttccttgttcctatctccactcttttccctaaatccatatgcgccctagtgataacagaagggaaagtgacttacaggaatttgatcaaggcgttgaagttcattctcactgttcaatgggcgcactagtgtgaaacattctctatcaggaaagagggcacggatggactcacggatctaagacaattcaaataaacaattaataaaattgtaaatcacaatgaaaactacaaaaagaaaattacaggtgttagtactctagagtacctcattctttgaagatatatcttttcctctgccttcaagaggcctcagagcgatttcaagataatctcgtggagttatcttcctgtcgttctcaactaaatctaggtaaaaatcctaaaaaaaggtatcttagactagagaaatccttcaatagtttacaaaaaataaatggaaaaggaagatcaaaatcacaaatcaattaccctcagtagccagatgaagataggtgagaattgcccgagctctgatgcagtagacttcccaccatttgcccgcacacggatatgcttggtcatttcagtaacaagtgaaaggcgatcaagagctgcctcatcgataccacccatctgcaaatggaaagaacaaagaacagtaaggtatatttattgtgcatttcaacatgtttagtgccaaaagataaaacacattgcaattatgttatttctcatgccttcgggggtcacatcatcatagcatcaataatagagaaaattgtgatctaacttgacactcaagagtaggatattaacattcctaacagaccatacctctagtttcctaacaaaactgacacattaccaaataactaatacattatacatatgcttggaacataattaattatttggacaataaatattcttattaatactttgtaatctttgtttgtaaaggattgcattgtcttcacacatgtatatatgcatggctagttgatgcaatgcacgcatgcagtttgttgcattcaaggctaattatttttcatttttaagttgaacttatgatatatttaattatttatttaaaacgcactttgggcactacactggtaagagaaaaataaatatggccaaaaaagatactaccaaaaacctcagtacataaatggaccattttgttatcgtctgtccacaagaacagacagcctattgaagccattctagttgcagacagatagtgccaagtcaatcaggtacctttaatccttaaaaagaggagctggcgatcgtgttctctacaccctcaatccagatcttctgttgatatatttatgtatatgcatgtgtgttatattttgttttgccaaagtatttcattatttgcaaatgcatatatgagattgctggttgataatatgatgtatggatttttttttaataacaactgacttttaaaattgaatgtgaaatatttattcaagatcagtcacaacacatgggcacaatgctggttttctatacagcaaggcagcatcaagtcatcaataaaatttttatgtctcgaaacaaccctttcaggtgtttaacagtttagtcattgccaaatggtgaggggagtgcatacaaattgtttgactgtttctttcattcaagtatctacccaacattcttttccaacttaaaaaaaattctgcttctgctttctttctctactctaaaatcaacccctaatgcagcagcagcatcgctatgttgcactaccttaagattccgtcatcaactcaaactcaattaaaatatgaattctcaaaccataaagatacttagacaacctttagccaaagtataaattatctgtgaaccttttcataaattttggcatttgaagtaaatttccttcaataactcacagtaaagcatgcatgatataccagataatactataaggtgtacatagataaggcaagaatgaaaaatcccataatttattaagtgaaattcggtcatatgccagaacggaaggatcaagacaaaagacataattgcaccacacctgattatatataaacatacttgaaagtaggactgccagtgagaatatctgaatgctgtaagtgccctgccaaagaggaaacaagtcagtaatgtatagactacagattaaaagttttctttttcattactacttttcttgcatcatcacaaaaacaaaatcttggacaatgctgaactgttttcagaaaatgcacaagaaaataagggaaatgcatttgcataagccatcaagcaattgttagatcaaaacctcttccattcaataagcaaaacacatgaattgagtgatgatgttaaacaaaaattggggatataaaccagatagatcatctcatcagtgcactaccttgaattcattgagaacaaattgctgccttgttttgaacctctagtcgaccagaaaaacaaaaatgtgaaaatgaacaggaaagcagacagatggatattcagacttcccaagtttccatacttatcaaacgatgatgtatacatgaagcacagcaggtttctatgatctgaaattccgggttttcagtttttacttgtatgcatcatgaaatttcataatttggctcaccacaataaaaaaattattcaaaaaaatatctgttgagatttcatggaaaattgggactagggtacaagaatgaggtcgatgaggtctggtagctaccataccactagggctagtccataaatttaggggaaagtaatcctaaaatatatggaaaggacttcaaagcttgaacatattcctctacttgagcttctatacaagtacacataaactcataccctaagcactaggaaacctagcattttaagcatgaatatgtttgacaacacaccagggcaatatattacattggtaacatcacatgataaaggtaaatttaattactgacctacacatcatacaagcaaaagtcaagcagataaaggtaacagtatcagtatgccataggtaggccagaattgtaagcatgaatatgtttgataacacaccaggagaacactcaattacatcaataactccagatgggtgcagtctgctaaatcatgcatacataaaaagggctgttgcataaacgtcaatgcgtgcatgagacagcataaacatttgggaaatagcaaaggaacaggtgtttgttgaagaatggacaacacatagagaacacatgggatcaatatttgaagaagctgaggcttagcaacaaagtgggatcatcgaggtattactcaatactcaccgtctgatcgtatgcatcaatgccctcagtatcaagaagcaaaagactatattcagttccatcaagtgcagttctttttattggggcactccacatccaaaggcccttggtgcagggccgatgggtgcttgctacttgaaatccgctgcttcttcctagaagctgtcaaaaacacagaaatagagcagattactccttgacaagataattagctggtatataaagtactccgtaatcaaaatcttgatatatatgaatttgctaacgaggcttcaaatgcaagaaattgagatgtcaaaaacagactcttctccaaactacaaagtctaatagaaatacttttacaggtcatgctctgataggagtaaaaggacatctgcagtcatttcacacccaaaaaaaatgaaacttatggtaaaccttgttagcatacatcaattccacaaaatagaaaatataccacacttagtccatcttcctttccgattttattttcaagacatcataatccttaataagtcattatataaataccaaaggatgtttcatggtccactagaccagaatcaatgttaaggtctaacaaatataaaatatcctcaggagaatcttgtaagtgtcatcagtcatccataaattcatcgaatcaatgaccaaagtaaccgggcagcaatacgccaatatggtagtacacacaatgcataagaaaagttggccctctttgattatttaggaaagttgcatgccttaatacacccaacctttatcacggttctgaaagaatgtatagcggaaagaagaaaaaacagggaccaaaactgattcccgcaggtggaaagtttattgagaagaaaaaacacggtaagcaaaagttttacttttgcaatgcaatttctgcacgagacatacaacccacgaaatgttgtcttttcttcctatttctaaatgaaatgtttacgccgccaaccaagaccccaaccttccctaccagtgtcccctacagtgcctcgaactgatatttatttcttccagattcttatcaggatcctactagtgttccagtgccgatccacaggacagatttgttcaaccattggtaaaaagaagaggggggcgagagcgaacctggttaaggatgaagctcttgccctgcctggcgcggccgcagacggagacgaccccgacggggcccttgacgagctgcagcgcggccaccgcctccgggtccatccggaacctcccccgctcgtcgcagtacaccagccgcagcggccgcccacccccaccccccgcgaacggcgaccgcggggaggacgccgacgacgacggggtccacggcgagccgtggcccggcgacgcctcgtccccgccgcggcggccccggtcccggtccttggacgcggagccgcgtagccccagcatctgcatcatcgcggccggccgcggggagagagagagagaggggaatggaatggatcctagggtttggggctcgcgagggtttgggggtgttgggggattcaggggatggtcgcgcttccccaggaagggaggaggagacgagagcttcggtggccggtggaggttgtgggctgcgcctttccttttcgtgaggacggttgccttttttttcgctgtctttggttggaggtggggcccacttgacgcgtgtgaggagaaagttttggatatctttcatttggtatcaatgctctgtgatctgctcaactgttcccagcatcaatcggctgagcgttaatgggagctaaaatttgccaggattggattaaggtccacacctctctcataaaagcacagtcccataaaaggtgatttgtgtcctcgaaagcacatgtgtagaggcaacaaatccagttgcaaggccaatgccttcgcagcagattttgagctgtcaacgttttttatggagaatgagccagccaaaagacctcaattttggttcagctggggccgaccagagggaattaaaatcgacacgtgtgtaggatctttcgaattaataagagtaagcactcttacttgtgtagcaacccacagtagtccaattctaggaaatattatcagaaccttgtggtagttgaacttcttgccgtaaacctcccagctgcactaggtcattgatttcttcaattgatgtaagatatctaaaagaggtaatccagttgttggaagagagttccatcaacacacctttgttttcttttagccagacgaaagcaaagaggtgctatgtctttcggacatttaccttggagccaatgatcgtgccagaaattcatttttttaccatctcccaatacgtttgtggttgctgcttggaacaaccgtctatcagtatcatcacaaggcactttcatgccaacccaaggtttatcctcatctttccactggaaccacaaccagcgtagacgaagaatcctggaaaatctttcaagatcagggaccccaagtcctcctattcttttcggtctgcaaactgttttccaattgaccaagcagctgccaggattagtgtgatctgggtcttcacctttccaaagaaaggaccttcgaaagcggtcgatcctcttgaaaacccatttgggcatgtgcagagatgaaaggtggtgaattggcatggagctaaggaccgtttttaccaacgtctcgcgccccgaagaagtgaagaatcgacctttccaagtgggaagcctttcccctattttttcaatgagggggagaaaatcaattttccttaattttcgataatgaagtggaaggccaagatatttgcaggggaaagatttaacgatgccggggaaagcttgcagcaaagaagcaaggtctacctcttcacacctaatagggaaaatctctgtcttggcaccgtttgtatgcagaccggacactggcgaaaacaattaacagctaggtaaaaatgttaagctcagaaatgttcggctttgcaaacactgcaacgtcatcggcatataacgagcatcgaaatctgacccgatttctatcaatcggggaaagtatggaggtattttcggctgcttatagaatccgatgaaaaggttccattgcaaggataaaaagcattggcgataacgggtcaccttggcgcaggcctcttgcatggaagatctgttgtcccggcgcgccattgacaagaatttgggaagacgtcgcaacaagattcgagatccagttgagccattgagtgcagaaaccaaattgttgaaggacatcaaggaggtaaggccaacataccgtgtcgaacgccttcgcaatatccactttgatgaacaggctttgctttttagtcctatgaaggagctgaaccatattttggacaaaaagaaaattgtcatggatggcccttttacgaacaaacgcactttgattttgcgagactaactcattgagtctcggtgccagccgattggccataactttggtaatgatttttttgaagctgtgaacaaactgctagcatcatcttttttttgggaggagacataaaagccgaattcaaatctgcaaggtgtgaggtattaaggttcatgaaagaagagatggctgccagcaaatcccctttgattatctcccaagctgacttatagaaggcttcgataaaaccatccggtccaggtgctttttctgatggcatctcgaaaattgtgttcctgagttcttcagaaatgtctccttcaagatcagccaagtcccgaaggtatttgtagtgagttccagttcaaccgcacacttctttggaaattggtacccaatctttctttgtagaaacggtaaagttcctcttctttatcttggtttgtgacagcaattccggttggggtctgtaaagactgaatgaaattctttcttctccttgagttggcttttaggtagaaaaattttgaattaacatcaccctccttgatccaggtgagtcgagaccgctgtctgatcttaattttgttaagcactgcaagccctagcactcgagatttcaggttagagattaacagacgttccttgtcagatagacttcttgattcttgtgctacgtcaagctgaaaaatgactacagtcgccaccgcaaattgcagcgcaatgtcccccacctgacttttgttccacctcttaagatcacaagctagtcgacaaagcttgatcctgaaaactgcaagagggttggtggcaaagattgatctgtgccaggattcttgaactacttccaaaaaacctggaattttcaaccaaaaggcttcaaaacggaattgaggtggtttgcttcttttctcttttccaacaaggaaaagaggtgcgtggtctgaacatgtagaggagagggggaaaaggtgtgcttctccaaacatgaaatcccaatcagttgtgataaacgctcggtcgatttttgtttgtgttggatttgtcccatctcccgcccacgtgaagcgacgaccaggaaggtgcagctctttcacttggattttatccaggagaccactaaaacgttgtatcatccttctattgagacgatcattatttttgtcagaaattttgtagataaaattgaaatctccgatcaccatccaagctggtttcatggtgggttgaagtgtctctagttcagccaggaattcaattttttcagcttcgagttgagggccatatacaactgtgatcgaccattgaagcccttcttcgcgcatggttatagtagcagatacagagtattgactgagaaagacatcagagagatagaaataattttcatcacaggcaagcagtattccacctctttgccatcagccggcagtgcagcatattgctatgcaaatctctgtccaagagagttgaggaggatttgggaagagatagctgaaagttttgtctcttgcagacagacaatcgacgcgccgtattgttgaatgagaagttttatagcatcttgtttggctctggcatttagacctctaacattccaattaaagtggaaaacattttcttgagacatggaaacacagatcgactaagatacaaactagcaatccccagttatagccgttcttgccgaaacacaacccagatagacagggagaaacacaacaagaaggggtggagagctgcatacagaggtgatgctgagttgcagacacagtttctaccaacagacacaagacactcatactgaagcaagtccgggacagctgattgcgaagtgagctcgggaaagacttcattaaattgcttggcgaccttgcagcacagctccggtcatgcttataccggcgccaccgcagacttcttggttgtggccttcaggcgaatgctcttgcagccacccttctcgaccaaatgcgcgattatctgcagagacaccagagagagtggtttcttgtacaactgcaagtaaattttcttgatgttatcatcaaaggcagatttatcatcaaacaacccaaaattttttgacaggatttcctgggcaaatgtttcaagttttgcacccgtgcgccgtttacaaagcaaatgctcacttgctacgctcacatgctttgccttctccgaggtctccgatccgagaccacgccttccttcaagctgacacttgcttctcctcgcaggatgatgatgtgctcagcttgctagagcggcaccttgatcccttgattcatgaggcttctgtgcagcactccatctactcgcctgactttgactcccagcgtatttcctcccctgttttcactacttcctttgcagctcagggaggctctgatgctgatcagggggcgaagtaagttgaggcttttgtcaacaacataacaactacaatccagccgccgctccttcccaccccagcaaccaagttcgtcgccctgcccgtaataaggtggtaatcccgattctttctccggtacagcttatcaatttatcatcctggttttttggctcctctattcctgtcatttgacaatgatggaaaaggtgacaagagtgagataatggaagagcaaagcgtacgcacctcattcgagagtcaagaaagaggggaggagcctctttacaagctgcttgttcttgttacatcttgattcggtctgttctgtttctgattcgggccattcggccagttctgtttctggttttgaaatgtctatgtgttggacggacgagaccagatcaaaatactcactgccttctctgcacagtctttgcaagctagggcatccccatagaagtagctctttgagtgtggggagctgctgtaggagaccctacagaaatttctctatctctgggcagttccaaatcttcaattcttcaagtgaaatgaggccatccatcccatcaggcaactctttcaggtcataacagtgctgcaaactcataatctttagcctggccaaatttccaagcttcgaaggaagcgccaccaatcttgggcaatatactagacatagcttttcgagggatgcaggcagcatcgggatatgtaattgaccatcctccgatgatgaaccctttccctcaaggttacgacaagtttcaatagacagggatcgaaggtgaatcaagctcatgagctcctctattggccagcgcacaaggccgtcgcatccactaatagacaagtcctccacaaaggcaaagcatttacatagcccaagatgtatttttgagaaaccagatacatctgtgaagcagttgaggcgatatagcgttaaactccgaaggttttctagtgggccttggtttgtaccgacctccagagtggacattttgttatatgacgaactaacatctagtttcgtgagagatggccatgagcccaacgacattctcacacgctcattgtcctcataaatgagttcagacaaagttgttagatgtgcaagtgagctcattgcaagactgcaacatctagctgagttcaattcttttagaactgggcaatctggaacacttgcaagttttggacaatcgaagatatatagctttgcgagctccggaaacgtaaccaaaatagtatcggcctcgccaacagtattttctgtctatttctccaagtttgataactggcatagagtcatatcctttaaccttgggaaaatttgcagagggatgtagtatcattcggctttcacaccagcgacattcataaacaatgtggttaggtttttcattttagataagaacagaccctcaagcgagaccaaaaaccacacagtcgatagatccttacatcctggacagttgaaaatgtggagatttgttaggcactgcaacaactgtgggtctttcatccattgtgggatctttaggccactatatccgtgtagttccaaaattttgagcttagcgtgaggtttaagagactccaacacttcttcctcgttgcatcccttgttttcaggcatgcaaaatatactaccaccctaagaaagtactagttcacttagattttgcttcagatggagattggcatcttttccattttccctgctatttattttactcaaattgtacagttccaacctgtttttgctgggtcggcggaaggaagtcgaccaaatttcattaagataaaagagggtaatacaatatacacaacattatactgtcgagtcgagggaaacctcgaaaaagaacaggaaaactatttacagggggccaaaaaacatgctgctactccccgcaagaaaaaattccggccgctctccagatcaggacctcctctttgatgtctgccaccaagtgttctaccacccttgatctgtcataaaaaatccttgcgtttctttctttccaaagcttccagcagaccaacatgaacagagaatcggaggcggccctgtaccttgaccgaaaacagagacgcacctgcagccaccattctgcaagctgtagaccgagctgatcaggaaggggaaacgccacattcagctaagttctcaactgatgccacactctgttagtgaaagagcattttgtaaacagatggatgcagtcttccggcgcagctcgacacagtgtacatgtcgtatcatgtggccagcctcgtttgctgaggttgacagccgtaagacaccggcccttcgcagctaaccaaaggaagaacctcactctcgccggcgctttggtcttccaaatcagctcaccgtgggggcacttcaccgaagggtagaagaagaactcatatgcagaggaaaccgagaaggcgccgcttgctgtaaacctccataaaaccgaatctgactgcccgtcttgaagagacacttgttgcagctcatcctataaattcagatagtcagcaagggccctattggaaatggacccctgcaagtctctaacccacctgttgttcgtcagtccttgagccactgtgatcttcgttcgaccgacaaagcagaaaatgataggccaattatttacaatactttccccacgaggcagccagttacctctccaaaaattgatgcgacggccatctcctaccatgtgctgtgcaatcgagctgaaaatgtcgcggacatccttatcagattcccaattagccattgtccatggcctatcttcatgttcaagcctgttaaactcccatttcagtcgtaaaaccttcccgaaaagctcaatatccctgattcccaaaccaccaaattcaactggcatactgacggctctccaagcaactaggcaatgaccccattaacttcttcttgacctttccacaagaaacccctgcagcggcgttcgatgtccttgatggcccattttggcagctgcatcacagagagaaagtgaaccggaatggccatcaaaattgatttgatcagacagagccgcccgtcaggtgaaaggaactttgatttccagcctgccacctttttagccaagcgatcaaaaagaggttgtaactctgcttttgttggtttcctcacggagagcggaagacccaaatagaggattggaaggttctgaagtttgcaatgtaaaatatcctgaaccaaggagctttgttcctctgtgtagcgaattggtgaaactgcactcttggagaagttgggaagaagatcagtggcttcactaaagagatcaagcacggctttgactagcatggcctcatgacgaaccggtttaaagaagatgactgcgtcatcggcatagagcgaattatttggtgctctgctccggtggttaactttatcaagcaacccggctgacattgctttctacaacatagcatgaagagtatccatcaccaggacaaaaggaagaggagataacggatccccttgtcttagccccctcataggcttgaaggggtcacttaaagtgccattgatgtcaatctgaagttgtaatctgaacgagctgattttccgctgtccccatttaccaagtgccttgcttaatcttgccatcttcacatacaaaatacagaaaggatcagagctatcgacctcactcccccaagactcctgcactacgtcattgaaatcatcaagctttgtccaaaaggtttcaaatttgaaccttttttttgcttagggactcggttaccccaggttaaaagaagaggacagtggtctgaacctgaagaacttagagcctgcagatgagcttcagggaagagatcctcccactgagtggaaatgaacaatttgtcgagtttcaccaaagttgggattgcctgctcactgctccaagtatatcttctaccaaaaagatacatctcctttaattctagatcgttcaccttactgcgaaaagcattcatcaagcgccgattgatccttgtgttattcttgtcttcggctgctgtaatgaggttgaaatcaccggctatcatccattcccccaaacaacaattcttgatgacagacaattcctccgaaaacaacagcttctcatcatccctttgagggccatacaccgaggtcacagcccaggatctccctccctggcgccaatccagattaactgtcaccgaccattgtccaacatggacaagagtgccctggaatagatcccccttccacgccacaatgattccacctctagtttgaagagcaggaagaaattcaaaacgatcaaaatcagggccgcaaagttcaaagacagtgacacgatcaacaacttctaacttagattcttggaaacacacaaccaacgcattggaggaaacaacagactccttcaccagggagcacttcacagcgttgtttagccctcttacattccatactagaagattgaaactcactcctgacattacaacaaccagacacccccagcccccggctaacacagcatacaaaatcaagcaggagaagcaactgccaaaggtgccacatccgctagcgcctggaactccggctccgccagttcaagatgaagcagctccgccaaggcctcaaaatggtgaggcggcagcggttcgtcgaagagttgaacatattcctccatcgcctcatcgtttgcttcctcttcttcttcaatgattcccagattcttcatagtcacccgctgtgccttggagatggagtggtgtcgggcgcctgagccttgcagagccagccgtgggcttctccaaggcttgaaatcaactgggatcaccgggcggcatctgctcttggtgattgggacggaggcaggcggcttgctgaggacggacgatgaggacggcgtggagatagcgtcgacgaagatgttgacttgtacgcacatgttctcatcggccgcaacgaggattgcttcctgggccgctgcggctgcgctctgcacttcctgggttgccgacacagcgatctgagttggcaacatgcccaatttagagccggcctcctttcgtcgagagtagacacggtcaaaaggcaccacctgttcctgggctacttgaggaattgccaaatacaacccacggacgacttcagtaggagccggacctccagctcgaaaatgttcccccgctgagttcccaccttgggggctgctgccttcaaccgcccctattaatggaggatccaaacagaggtcgtcgaagcaaaggcgtctagcagggagcggtgtggtctgcagcgaccagcaggaagcaggcgccgaggctggccttggactgctctcttcgtcttgggagttgcgaccgtgaaccttgtccacagtgcaatggtgtgccacaggagaggttgacctcgtgacctctctgtaccgtgggccaccgtcatgtttctcgtccgccagcatcggcgaactgcaccgtgaacctccgccttgctcctcgaccgccaacacgaacgagactgtcggggcgtgtacctcgaccccgccgcaccatcctccgccgccttgctcttggtccgtcagacgcagcgaatcggagacaacaggcgagcacctcgttggcaacatgagctcagcaacaggggatcatatcgcccctgcacccggtacagcaagctcgaacacacgaggtagggacggcgagatcacctcgacagtgtcgaccaccacttcgggcgagaccagcaccatcacctgagtcaacggcgagaattgttaaacgtcgttgacttgcgccacctgaagcgacgcgttgatcgtctcagctgaggagagaaccagaccccataggacgacggcaagcagcgccaacctcaggggtaaccgaagcagccacaccaacagccgtcgccgctacctcgaaaccctgcgttaccggcacttgtgtgcccagctccctcgtcccgacgacagcagcagcgtctggagaagacgggagcagatcctcccccgtagccgacgaaccgaaacgaacgatggccgacacagcttcctccgtgttgaaaagacggactggttgctgtatcaccgacggcaggagatcgaacgcttggcattccaaacccccggctgaacctgatgctcctccatagcgagtgctgcctccccggtccgatggccacagacctgcgctgttgaaccacttagcccagcagtcgaaggtgttgcgccttgtcacatcatcgtcaccatcatcgttgtagaatttatcaggggcatgcagcagcatgggatcgttcacctcttcaacgtggaggaagacgccatacagtaaaagagggccgtgctctaggcgctcgaggaggagcagagctcgaagacgacttcctccaggagccgcccgcccctatcttcttaggcacctccacctgaagccgttgaggaagcttgttaggattcttgaaccaggcgaagaggcccagacatctggtgtcgttggcagggatgctctcgatgagctccccctcgagctcgttgacaaggttgcgcaccacttcgcgctcccacaggtgagcagggagcccatcgagcgaaatcttggtgaagaacttcaagtccgagctgtctgcccaactccggcggctccacagcttgaaggacgtgggaacccccttcacgaaaatctcatgagagcaatggagaacaaggttccgatcttgcagcatgcggaacaacaccagaaaatcctccgtatgtgtcacgtcgacacggacgttgctctcgttgatgccggtgtgctggacgatggcttctaacatctcccccggtgagaccgatggtcttgtcttcagaaccatggccaacagcgagtgctggttgagccaagcttcattgtgctccatgcccaccgtccaggacagcacgcaacggccagtccccagccgcagctccggctcgccgactcgaaaaccctccatgtaggcgtgctccctagccgcgcagatttgaaaacctgccatctccttggaagacttgacgacgtcccgcggatgagcttcttcctcagctcgcccaaccactctgtagtcggcaggcggagcaggccgggacgcgtgcgacccgaagcagcggacggggatggcggacgctggcgagaagtaggagcagctgtatgcggtgctggacgagcagcaggacatggcgtcggctgaacggggcgagcagcagggtgcacgcgagctagagaagcgagggaagcaggctgagcaactgagcacgggcgagttgaagagacttcgtcatgctcggtgcaaaaactcgcaagatggcccgaaaaccaacaacggaagcaacgaatctggccggtacactgcgccttctgatgccctaggccaaggcatttgaaacacctccctgcaaccactaggggatatccctcaccgccttgaatgctgatggacgagtggttgggcgccggtaggtcgccattgaatgaactcctttcctccttctcacctctatccaagccgcctccttctcagccttacctaacgtgtggtccccaatccccaccacgatgtcgcgccaggaaccaaactggggtttggaatgtggccgtcggacaccggagtggccgtccaccgggcggtgagggcgctccctcacgcgctcgctccccagccattttccccctctcccctatcagagaactctctgagtagcccaaccgaccggttccagcttggccgtagctctccagttccaatctgttggcaaggtgattcaagtccttgagctcctcgattccacggccaggttcagtgtccaaaacaaatgttgttagagtgcgaagatttttcagtaggctaatatttggtggcatcctcttcaatggacatctaagaagataaagatggatgagcttgctcattgttctcataccttccggtaaatatgtcagaagtaggcaatcgttgagccttagtgtttgtaagttatacatcgtgcatattgaacttggcagcacatccatctaagacctagaaaggtcaagatatcgtagatgctttggattgatcacctggctatgagaagggcaagcccgaatacagacaatacccaaagcacttaatgacataagtctcaagtcagtaccaaaatctcttaatgacatctgtcttaagtcattaatatgtactagtaaccatgcagttatcaaagtgtggatagaagatgatattttgagcaatcccactgttagactcatttcattatcataggaaaattcggtatatcatcttttgctaagtcatgcatcaaatcatgagttttgcaacaaattatagactcatcagcagtgaaagaaaatgtcttgatcggtttcacgtcttggaggaaggatctccaaaccaaattacagaaaacatattcccccttttgttccaaacccattgtttcatcttcctgaatgaaaccatttgccatccacagttggatcaacacttctttgtccatctcatggtcctttgggaaaactgaacaaaaggcaaagcattcttcattttaggtaataagtgtctgtagctcaattttagtataggtatatcatcttcgcccctgtcattgtcccctaattgcttcttgcaattgtttctcattccttgacttgttgctttgaactcatcataccacccattgtcttcaaagcaagaggaagccccttacatttcttgacaataagtttgccagcggttaccaattcagcttgctgttgtacctctttactgaatgctttctttgagaataattcccatgaatcatcatcactcagacatgctgggttatggtattctagggtgcccattatagatgctactcgctggctctgagttgtcactagtataacacttccatcaccaccaccaacagaagacaggagtggcttcaggtcttcctcccacttcttcttttcttcattccatacatcgtccagcacgagcagaaaccttctccggccaacggccttctgtagttccttttgcaacaactggacggtttcaggcagttagcatgctttgtttgtagccaattcaatgatggatttcagaagggaaacaacttcaaagttgtctgacgcacagtgccacatctttagctcgaagtgattctaaaccctgtagtcattgtagaccatcttggcaagcgatgtcttgcctaaaccccccatccccacaattgggcccacttgtgctgatctcgctgattgagcaacagtttgatcaccactacctccttgtcgtcgtctctgccaaagatatcatctaattcatttgatggcagcactgagtacgtctgccggtaagaaagttgttgtggctcatctcgcagcaacaggccaaacgtgttcatctcttcaaccagctcgttgatcttcttgagcactttggcaagcttccttctcatggtaaaatggaactctaggggggtcatgtagctccgtaccttgtgccctagcgacttgaggctcatggcctcgcggtgcagcacctcgtactggaactcatcgaggacgtcatcggcctcgtcatcggcggtgttgaggtccttcatccagcgcttgatggcggggttggtctcgctcttcgactcagcgtcggccaacaggcgctcgacggccagcagctgccgctccagcttgcggcggtcgccgtcgacgccatacatgcgggtgactttctggacaagcgcgtcggtcgccttgccgatcaccccgtgcactacggggagaagcagcgattctgccatacaattgctctctttcacaggctgtctgctactctctctgctacctattgatgatacacccaagaagcaaagcaaggaggctatgagtcctctgctctggcctcatccaatctaaatcgtagcacaagtcaagatgatatttttggctgtcaccgccttcaatgattcatatgattctcaagttgactgacttttgtgatgttgtcccttcaggccttcacggtgcaggaacgtggcatctcgccacgaaggacagctgctaacgtggcagtgggggaccatttctttgtgaggaacacgggactaaggccttgtttagatcccaaaaatttttagctaaaaacgtcacatcggatgttatgacacatgcatagagcattaaatatgaaaaaaaaaccaattatacagtttgcatgtaaattacgagacgaatttttttagcctaattgcgacatgatttgacaatgtgatactaagtaaacatttgctaacgatggattacttaggcttaataaattcgtctcgcagtttacaggcggaatctgtaatttgttttgttattagtctacgtttaatacttcaaatgtgtttccttatacttcaaaaactttacatccctagaactaaacacaccctaacttaagacatgagaagctcaacggaaaaagcagataaaagcatggaatccaggctgtagaccatcacccccacctccccaccatcgaaacaaacctctctctccaccgtcggggtcaccgtcgctctggatccgtgccgccaccgtcgccctcggcgctccgtctccttgtcgccggccggaagtggagggcgccgacgagctctcacgccggatcctcgctgccaccgtcgtcctccgagccctcgttgctggctgggagtggagggccccagaagctctcgcgctgctgccgtcgccctccgagccctcgttgcctcccgggagaggaggggccccgatgagctcccgcgccgccgccgtcgcccgtcgagcgctcgtcgccggcaaggagaggaggggtctcggcgagttcttgcgcctccgccgtcgccctccgagccgctgtttgggaggaggttggggagccgccgtcctttgttggagctcgctgtgctgccagccgtcatcgagttgtggtggttggggaatagagagaatgatggaaggggagaaattgtatccttgtttctgaaattgagggtgtttagtgctaaattttatacgttatgtagtttaaaaacatgtgaggactaaaatagaagatggcaaaagctgacatgaaaagctaagaacacccttagggcgttcacaatgcgccgatgtggcgttcagcctccctccccaaaaccaaatatttgttgccacatcgtccatccgcgtggcctcctcaagaacgcggagtaagttttggctacgagttcctcatctcaggcggcgggacccacacgtaccagaggagagaggggagaggagcgatgatgagggaagatgcagtggccagagtgaggaggggagatgcagcggcgtgaagccatccccaaccatgccactgtcgtcgcacgcgtgcagtactcgaactcggccactgccatcatcactcggtggtatgctcacccgagcgcaatggcatggagtgcagctccggcctccgggcacgatggcggggatgacaaacaaaggcgaaagacgtgcgccatggcggcaagggagggcctggagatggagacggcggcgccctgcattggtgtaaacggaaggagacgaatgagctgtaaatttgacgggagtaggggtgaaaacggtacggaatatttccggattccgggtaggttttcgaaaacggaatcggccgatcggaatttttcagaaacggaaacgaatacgaaaatattttctcggaaacggaatcgaaaatgataagagcagtttccgtcggaactcggaatcggccagaaactttccgaaaattctctcggaatttcgaagttacaaagtccataatacctcccgcttgcctagcccaacccactacagctaaccctagttgaggagagtgagagtcagaggcagaggctagggattttggagcaatggtagtgcattgtgtgcaccacgcaggcacgccacacgcagccagatctggcgctgtcggccgccgtccccctacgccgccgccgtctcgcgccaccgccgtctcgcgtcgtcctccccccgccgtcactcgccgtccctgcccccggcgtctcgcccctctctgtgcttcaccgtcgccgtccacgccgctgacaccaatgcctcaacgccgatgcccactggcgactcttcctcaccaccaccaacaccgatgacgcctcgccgcctgacctcgccgcccgacgcccgggcgtcgtccccctgcctcgccgccgcccccctctctgcctggtcgagaagcacaaagaagcagagaaagaaaagagatagggagagagagaaaagagacaaggaggaaagagagaaataaaagaaaagaagataaaataaaaagagagtgggacccacgcctctccctcagcgcttgactcatcttggaccagcttatagtcgggccccattaaaatatttcatttgatataattgtattttacgatgaattgttgaccgttgagacttgagaattggacttgataaaagtttgaagctcagtttaaaaggttttttattccgataaattttcattaccgtatccgcgcctgttcgtttttgttcggtatcgataatatttgtttccggggtttcctttttcgattccgattctaaaaataatatgaaaacgaaaataataaagatggttttcgttccgttttcacctctagactggattagtatgaaatgaagaaattcgctatcctagtggtaaaatcttttaaagtcttacgaattgagtgctagactcttaggctgtgttcggacgtccattgtcccaacctatctccctcgttttccgcgcgcacgcttttcaaactgctaaacggtgtgttttttgcaaaaagtttctatacaaaagttgcttaaaaaaatcaaattaatccatttttgaaaaaaaaatagctaatacttaattaatcacgcgctaatggatcgctccgttttccgtgctactgttccaagttgggaacaacccatagcgaacacagccttaaagttcagcgtattagattgtacataatgaaatttctcccacacctcccaacccaaatccgtcacccgccgccgccgacaaaaccctagacccgccccgccgccccccgccccccgccccccgccgtcgtcccatcccgccgctcccccaccgtcgtcgcatctcgccgcccccccaatccatcctccggactccccacatcgccgcgccggcgcccacatcgtcaccgtcgaccgttcgacaccgccgccctcctctctctcgcactcatcccgtcaccccgacgccgccgactcctccctcctccctcatcgcgccttcctctactcgtaccaccgccgaaaccctagacccgcaccgccctcgaccgccgcccgtcgcatcccgcctcctccccgagtccgcgacaactattcccaaggttggtgtactccccgtcctctttctcctaggtctctaaatctgcatattcacatgttagtctcatccgtatggtagttttttttctttggtttcattgccgtcatccgtaagttgacatttatcgtcaatctttcactgtaaaattgtggctaggaaatggtgtgcctctgatagtatgtgagacaaacctataaattaatagccgcacaaatagaaaaaaaagcagttgtcacaggaatgctttggtgccgtttcattattcctgttctggctattagaattcatttggcttttgccactgcaattggccatattcttacttccagtgtcctttggtaacaatattagctcaatgcacaattctgtttttctattgattagaatgatacaaggtttttttttcaggtcatgaacaaaatgcagttgcacttttacttgttttattactaattcactaagtttaagtcacttttgttctggtagatatatttccttaatctgtactcatttgttgtttgatgactctaatcgatgatcatttatgcacattgtgactttctagcttaccatttgatgttatggtttaaggcacagaggagtagcgaaacatgatcccctttatctagaagtcactaagtcagtgagccccacctttatttgtgaagactacttgttagctgttactttgtattcaggattggcagtttcagtaacagctttaggcttagttcgtttcccctcgttcccaactgcccactctcgtttttcgtgcgcatgcttttcaaactgctaaacggtgcgttttttacaaaaagtttctatacaaaagttgcttaaaaaaatcatatagatccagcgtcatatatacaaagatggtggtagtataaatttagttagttttatttcgataataaaacgaacgagcgatatcgtagcgaacactcttcgtttaacttatgatattctatcaagcccatttaaacaatgatattataacgaaacacttctctatctctgctattataaaaattgaagatgtttttatcggtattttggtacgtcatccgtgtttgagttgttttttaagttcgtacgcttttagaaatacagatatgtgtttgagttagattttaagctcgttttcttttgaaaatacaaaaggagtcgtataagaaatcttttttttaaagaacactcacatgctaacttgagataaaagttggacttgtaattgtagcttgtgattttcttaaaaaaaaaatccaagcgaattcctatagtgaattttatcctatctaaaccgtataacaataataatgttaaaatagtattcacccattgcaatgcacgagtatttttatagtatatgtaaatttatcaatgttcacaccacaactcatcattcatgattagccagagacaaacatccatcaggtgccccatgaggccatatgtgagtcgaacacgggacacgggaagatccgagcagtcataaatcaacacggattgaaactgcctaattcaatggaagcttccaagcgcagccgccgaatcctccatctccggtcagcatagctcccgctcggccgcgccgctcatccctcaccggcacaccgcaccgtcctccaccgctcgccgtcgccgccgagaagagggacacagctgccgtgcgcgtccgagtggatgtggtgtgaggcggccgggtttgaactagccaacgtcatatatacgaagatggtggtagtataaatttagttagttttatttcgataataaaacgaacgagcgatatcgtagtgaacactctttatttaacttatgatattctatcaagcccatttaaataatgatgatataatgaaacacttctctatctctgctattataaaagttgaagatgtttttgtcggtattttggtacatcatccgtgtttgagtcattttttaagttcgttcgcttttagaaatacagatatgtgtttgagttagattttaagctcgtttgcttttgaaaatacgaaaggagtcgtataagaaatctttttttaaaaatcactcacatgctaacttgagataaaagtcggacttgtaattgtagctcgtgattttcttaaaaaaaagtccaagcgaattcgtatataacaataataatgttaaaatagtattcactcattgcaacacgtgtatttttatagtatatgtaaatttatcaatgttcacaccacaactcatcattcatgattagccagagacaaacatccatcaggtgccccatgaggccatatgtgagtcgaacacgggacacgggaggatccgagccatcataaatcaacacggattgaaactgcctaatttaatagaagcttcccagtgcagccgccgaatccttctccatctccggtcagcatagctcccgctcggccgcgccgctcatccctcactggcacaccgcaccgtttctatcgcccgctgtcaccgctgagaagagggacacaactgtcgtgcgcggccgagtggatgtggtgtgaggcggtgaggcggagggaacgcggggagcttggggcacggcgcttcgagaccgccgcccgggcgcgccgcaccgcctcactcgcactctccaaccgcaaggagttcaccaccccgcacaacggcgccgtcaactctctccaggtacacccccttctcactccctcactccccttctccttctctcaccttagtggtttagatcaatttgatttgtacaccctgtagatggaatcttgcgtatttggtgtgcaattcctgagtcgctcccgctggtgttttgtaatttgacaatatggtcaggttgatttgatagagcggcggtacctgctctcgggcgcatcggatggatcagccgctatatttgatgtgcagaatgcgatcgaatacgaagctgggttcattgccaagcataggagcattctccttgtggacaagcagcatgaaaatggccacaagttcgcggtatctatggccgtatggtatcctgtggacactgggctgtttgtgacagcttcttttgatcagtatgtcaaagtgtgggatactaattcgactcaagtatgctttcatctgctttgtcgattgctaatttttcttttgtcttgcctcctttgtggtggcaatggtgtgatcctgatgttctgattttttgcctggttttcttttctaggtcgtaatggattttaagatgcctggaaaagtgtacagtgcagcaatgtccccaattgcaacaacacatatgctgatcgctactggaagtgcagatgttcaggtccgtttatgtgatattgcttctggagcctttacccacacgttgtctggtcatcgtggttagttgcttacttctagtgtagtgatgaaaatatgcttgctttgtttgtatggttaccaccttatccttggtatctgacatgtcagatggtatcatgtctttggagtggtctacttcaagtgagtggattttgatgagcggtggttgtgatggagcaatacgattttgggacataagacgagctggatgctttcttgttcttgatcaatcacggtctcaactaggaaggcggcctccttttcttgagggcacctcagataaggtatggtcaccattatccatcacttacatttgttttcaaaatatttggttgcaacgctaaagctggacttccacttttattttctgcaaaagcttcaaaaatgttgcagctttaagtaaaacattatggttgtaatgctacagatcaatactgtcagccttcaagtaaaagctgatttctgcggctattaatttataggtttgtctcacatattagtgtcagtatataggtgctatggatcagtttagtgctccaattcttacaatataaggtctgcatacattgtttcttgttgattgttgtgccctagaaatgacgcgcaaactcattgatctagttgtgcaaatgatcaatgtattcatttttaattttgactaggatcctttgaactctttacaaccttcatcttcttcaaagatttactctgcacagcagaggacaggcaagagtaagaaacagtcacacaaattgcacaaaagtcaaatccctggacatggacatatccaacagagattgcaccctggtttgtcttctagtcaaaatcgtgcaacggcgcattatggtgctgttacgggattaagaacaactacagatgggatgtaccttcttagctcaggttgattgaatttaattgctatttctatgagcattcgattgctattgcttgaaaggaattattgcctatggctatcttcttgttatgcctgtatgcagtatgcattaatgattgttatcctctctcttcaggttctgattctcgcttaagactttgggatattgattcaggctgtaatactttggtcaattttgaagctatgcgattacagactagcaaaccactacaattagctgtcactgaggatccatcacttgtattcatcccatgcatggcaagcattaaggtgtggtcattttttagcttctcagtttggacgctgaattttatacttcaccttgtgttgccaaattcatgtaggcgtacaatttatggtctggtatgacatttcaaacattccgtgggcactatgaacctgttaattgctgctactatagtgcacaagaacaagtaagtcttccctctactcctatcctctgttaaccctgaatgttcccgcatcaataccattgctgagtcttttggaattcaggagctttatactggcagcaatgacaggcaaattcttgtgtggtctccatcaactccagcatttactgaaatggtatattttctatttcttgttatcatatatctttctgtagaattttcctacatcctatcaaattcaaatttctcaggagtagtcgggcatattgggatattattgcataagcttttttaggcatttgattgttagcactgctaaacctctgcaggaagatgatggcaagaggcaaatggattttgtagtcgatgaggataactggagcgactgagaattatgcatgtatagttgtattgtacactaagaacattgacattagggatgttaacaggccatgtttttttttctttttttaagggaagccacgtttattactattgtacagtacttcatcctgcagtttcacccgaaatatcactttgataaagacagctaagtgaaatgtaaatatgccaaattctctctccaataatgaaaatgctcctatatcgtgtttacccaactgttatgatatcgtgttaacaaagatacatcagatcttctctttatctggtaaggagcaaggacagaaatgctcctatgtcgtagggtcgtgctccctacgagaacttgagcacagcagcgaagaaatgcctcaacacattgctgttgatttgtttaaaaaagcttcgacagcctaacaactcaacaatccttaaaaagagtagtacatattatgaagcaacaaggctgtatgacttccaaaacttaaacagcgatgcatgaaatcccacctaatatcgtgcagttttttagctgcatcaataatctgtgcgatcttacatatgttacaggaaatgaataagaatagctatcaattacaattacaattacaacagattttgcgaatctggatcgccaaaggcacatattgcacttatttcagagtaatgtggaggaagaatcgcatggagtgacaatattttctattttcgaaccaacatgcaatgaattgctggtcccaaaacacagagaacctcgcagctcaggtaaagcttcagtccataaggctatacagctccgtcgggagttccaaagataggccctctttgaaagattagcccagggctaattttgagagctaatgtttagtcatgaattggtaggctaaacattagcctagggtggtatgtttagatccatgggctaattcaaggctaaaaggtggagagagagtagaaagagaggagagagagaaggagagagagagagagctgctttttgatggtccccacacgaaattagccccattagtaccccttagaggggctaatgttttgaggggggctaattcatattagctcaaaattagctcacctgtttggatctctgagggctaatttgaggctaaaaggtgagggctaaatattagcccatgaaccaaacagggccataatctgttatattgcaagcacagtgcaagaagttaatacatataacccaaaatggacatggtgatcaaaataacagtagaggaaagaaacggatgaaacataccacagcatgcaacagtttattgtgtagatggacacatgcagattttcctgatatacaaggagattcctcaagtgtgctcttgttccttagatcctctgacaccggataatgcctgcagcacctccatagcacaaccatttctcgctacctttattcatggtccatctcaaccgatgcattgctacagctttaggaggaaatacctcaaaattttcaggggattcgctacccctgctggtgcttgtgccaaagttctcttgcattgaaggagcagctaaaactatggcaccagtttcttgtccttcatcaggttcatcttgttgaccatctctgatgctcggatttatagcacaattgcattctgtatggtggttaagcaggcatgtcaggtacaagcaaaatgatacaagttgcaggtgacagcgattacctgagttggtaagaagtttcccttcttctataacatgcaattgagctacatctttgcaagttttagtagcccgtttggtctccagaggaacatttgacaaaggagagtttggtaatgcgataccaattttaatggttgttccctctgataatgaaccacaaagaaaatatggtacacggtttctcccaggttccttttcctagaatctcggagtaagctacagtaagttgaatatttatttagcaatgttatagagaatcacaatagcatgcataaatcaatagtttatgtgctgtttagtttacctcaaagcaaacagcagttccatcagccacacaataagccgcatagcctggatatcagcaaaacaaaattacaaattcatgaactatcatgaatatatatttgacatttttactctgctcaaatgtgtggaactaaatattgatataaggctataaccaatattccgatacttgacatctactatggttggacatgaggtgaaatgcacctgtaatttctgaggcatggacactccagatcaaatattcaggcaattgataggtagaaacaccctgagttttcgttccaacaaatggccttccagtaacaggaacatcatttgcgattcttaacaagctaacgaactttaatgcgccatcttccaatgatatgacaatacctctgaacacaaagataaaaaatataacagttaacattaccattctagtaaaaagggtatgtctggcatatatacacacaatatcaccatgaatgaaacaatgtggtctatttaatcacgtctactttgatccagtaatacatcaagaccatgtccagtgaaggaagcttgcatctcatttagaaggtacgtgggcaaatacaaacatttatattaataattatgtaaacaagtgcaaatagagcgtttgcaaaaaaaaagtgcaaatagaattacttaaaaaaatacgctgatgctttaatggaactaattatataaacaaagacaatatccaccttagcacacactaacggagaagtacaggccctatgaacataaattacatgactaaaataattgtcaacattctagcaaatatggtttctagtatgtgttccaacattaatgaaaacatacatctccatttaaaattagtgcagtgtttcaaagacaaggaaaacaacgtaaacaccgtgttagtgaagaaaaacaagtacatttagtgcttaacaaatattaccttgcatccttcaaccattgaagacttattacggcccttcgagcagtagttaactcccaaagatgacgatatggatctctgcagcaaagatatcttatgagatgcactaaaattcccaaatattacaaaacaaaaacggtagaaaacaatagcaaatccaagggggctgtgacaggtagtgatttaaccataacaatcagtatattcatagccaaacatactgcagcttctagaacaagtttcttagtgcccattgaaaagctaaagaaaaaaaccgtatatcgcactggattcataaagaaactcctactgacatcattggtccatgtgataataacatattctgcatatcgtgcctatcttttgtttgttaactcggaatttttaccattaggaaacaaacagaaacaaatatgaatggttcagaaattgggaggtgccacgaattcagagaggaagggggagagactaccctcaatgttcagacctctgaggacccatacataatattagaaattcatgcaggataagagagtagttcgaaagatgttttaaacattgcttcagttcacaacaaggccaacacctaccttaaatccccgaatttcagaccatcctctccaccagtgacaaaggtattcacgttttccttactgatagaatgacaagagtcaaaactcaaaaattatcttttggaatagaccagagtaacagtacaactggctacctcacagatggtgcccacgacacggttctgatgggagcagattcagcagttacacacataaaaggttttgaacctgtttatcaacagaacacatgatttagttttgtttgaaaacagaacagaataagaaaagcgaagatttgggaactccagtaactggctgcttttaaaccagtaaagcagttctacagtcagacatgttgtcggtaaagcagttcttcaaacttccaacttttccatcacatcaaaactttcatacacacacaaactttcaacttttacgtcacatcgtttcaatttcaatcaaactttcaattttaacgtgaactaaacacaccctaaagcaacctggaatataaaaaagtcaatcacagaactttcagaacagcaacttgaaagactcaaaggtcacatgatttaagataagaaaataattttgttgggtaaggaaaaggtaccgttccatcgtgacatcccgctaataacatatcatgagagggtgaccaatcaactgtcaagggaatgctgtttaccattataaagaggcaatggcttcaaaattaaagttcatgctgaggaatttagaaatatatccaaaccttccacctagtttgagctactactagcaaaaaaaaaaaaaaaagtctacaggtccaatacctttgtctgttcccgcactttacttagttcattctaggttttcggtgccatcgtcctttgctatgttatatctaggtgcatgcatttccctttataacattttcgtttggaaatacatgttagcttgttttgttgtcatttcatttaataacagaatactccagaaaaaaaacttgttagactagcttagtaaggttagcattcctacaatcctatgcatatatttatttatctttacatagaagattaaacatttgttttcattatttgtgatcagaaacaagcaatgggtcaaatttatagaaatggcatgccaaaacttttagaaattttcccaattttctagcttttttttttcactattttccacatttttagtaaacaatttttttttgaaatttcacattggtttcttgacaaaatcaatcggttttcgatacaaacagattgatgttttcacttccaactgtcgataagaatttcaacgtttccattcgaaattttggtaaagccaatcgatttttgacacaaagaccgaccgatatgaatttgttggttttcaatcggatttcgtgaaaaccaacgtgctgccagcgtttggcatggaaggtggtatcggaattgtgaaccctggtggtggccatgctggtgatagcctgctgtgctgttttctcttgcaaatctgatccttgcatcaggctccaaaccgattaccattcatattacagctagatactccatgtgttggttcgttttgtggcaagattcttcaaatagaagtattactggtacatgcatgtatactgatacagcaatggtgctagcaatgtgaacaaatcttacctactagaatatgtagatgaaaaagaggtctgttcattttgcctagatacctaatagcacaggtaaaagccttctacttcgaacccataaaacacataagttcctcatttgaagtcacatctgcaccggatagttaattggttacaacatgtatgtttttcggatcatgcaaaacagtttcgtcctttgaatcattagaaaaagaagagtacgaagcagagaacactagaaactgtaaaaacaaacttgtataaaatgacatgttcacttcttcagccgattttccatgctttgacatgtgctctttcttcccatctgtttttctcgttccgttcattgttgtggcctcaccagaacggccaccattattagaagtagactcattgctactgctcacagccttcactttagctggtaggcctttcttcttgccatctaatctctgctccttggtccctattgttgcaacaggtgggcatgattttcttcttatcctgccattttctattttctcacctacatccaatgctggcgcacggcatgtaaatatagatcttgttgtggtcagattcttcggtgcattgtaagggagttcaggtttcgtcacattcttgagtccacttgtggtactgccttggcttgcgtacgtagcatctgtcagagtgtttcttgtttgcattcctacttgctgtagaaactgtaggtgcagttgcagcaacaggtttgcctgctcattatgcctgcgtaagttgatctcttttcaattgtgcaaggttggttattctcagtggagatggatggtgcagcccgtctgaacaagttctttgatgatgagtcaggtgtgggtaaccgatttttttttgttgcctttgtcctcccagaaagctctcatggataaagtcaagatcaagataagctcttcgatgaagaaacaagttctatttcagacgcgctacatgactgcttttgacacctttttcatgttggtgagctggctaatttggaaggaacgcaatatcagagttttcgaccaaagaagcaagacggctaagcaccttgtggcagatattaaagaggaagttgcagtttggagagctgcgggtgtttttcagtgttgtgaggagtagcccgcgccacccacccccccctcccccccggtttctgctctccaggggtgttagtccccggctcgacagtttaatgttgtgtaaaatctataactttcccctttcaatcttaatgaaatttggtcggctccttcgccgacccggcaaaaaaaaaaaaaaaaagaaacaggttctagaaatgtggttttcagttgaggagaaaagctgcatctgggattttttttttagatgtaggataatacagagcagatagtataccctggaagctgaaggtttaactggttgagggataggttgcttcttctggaaaatcatttgagaggagttggttggtttccgtctctatggaaagaaacagtggtgtaactggaggcgtcttcagcctgaaacgagctgtgcttctcaaaaatagttccaacaacacaggtatatgatctagaacaagtgaattataacctacctgtcataatcatgcttctcatccactgttatgaggaaatcctccttccctgatggggctttgctggtgtggccacccatcacagattcagattgagaggaatacaaaaactgcagtgagtttatccatctttgaatcacgcctagacatattaagagattgtgaatatgtccataacatttctgacaacatgtgtaggaaaaatagaaatgcaagaggcaaagatctcaccttggatagcatcaaactcaacagagtacttgtgttccaggaggttaatcgatattatctttgtcacgcttttacagctccctgaagaaaactatgctctcatatttctctttataaattgcagaggggaccttagacttttgctcatcccagaaatcctcctgatgctgttcatcttcaagaacaagctatatgttcgctgcagaaaaagaatacaaagatcaccagaggcatggagactgcgcctaagtcacaaagtttacgtgaatactactactctaaagaatactactactctcaatcagcagtgcagatcttgggtagatgtggccaaagggatggctgacgaggcttctctttggcataaagcaaacccagcgattcctgcgctgcaattcaggagggagggtgtgtttagttcacgctaaaattgaaagtttgattgaaattggaacgatgtgacagaaaagttgaaagtttgtgtgtgtaagaaagttttgatgtaatagaaaaattggaagtttgaagaaaaattttggaactaaactcggctggagtttggttgccaaactcagtgcgatagatagacctaggattaactgtcaatgtcctgtatcagtcccatgctgttttttctttcaaatgtaaataacttttatttctcttaatggaaaagatgcgctccttgcgtattcctgaaaaaatattactactctaaaggatccaatttttccggcaattccaaagcaaactcccggcgcttagcttatgtaattaattaattagcttgtgaataatggcagagtgaaataatggaagagcaaagcatacacacctcactttgagagtgagcaggaggggaggagcccctttacaagcttcttcaggcttgatgttgattccgtcacttctgttttgctactggaacaactatacgtggaatggaggagatcagatcaaaatactcgccaccttctctgcaccgtctttccaagctagggcagcctgctaccattaggtatcgaagggtcggaatctgatggaggagaccctgtggaaatctctctatctctgggcacccccataatcttcaattcttcaagggaaataaggccatccatcccatcaggcaactctttcaggtcatgacagtgctcaaaactcatagtctttagcctggccaaatttccaaggttcgaaggcagtgccactaatctggggcaaagtagcagacacagctcctcaagggatgcaggcatcgtcggaatatccaatagacttttgcagtctttgatgtgaaacttctctagatagtagagtggcatgatttcctccgatgatgaaccctttccttcaaggttatcacagtgttcaatagacagggatcgaaggtgaatcaagctcatgagctcctccattggccaatgcacaaggtcgttgcatgcaccaatacacaaatcctccacaaaggcaaagcatttccatagcccaagatgcattttggataaaccggatgcagctgtgaagaagttgaggccatatagcctcaaaatcctaaggttttctagtgggccttggtttgtgtcgacctccagagtggccatttggttatatgacgaactaatatgtagtttcgtgagagatggccatgagcccaacgacattctcatagactcattttcccggtaaatgagttcagacaaagtggttagatgtgcaagtaagctcattgcaagactgcaatatccatatgttttcaattcttttagaactgagcaatctggaacacttgcaagttttggacaatcagagatacatagcgttgcgagcttcggaaacgtaactaagctagtattggcctctccagcagtactttctgtccatttctccaagttcgataactggcttagtgtcatatcctttaaccttgggaaaatttgtagagggatgtagtatccttcggctttcacaccaacgacattcataaacaatgtggttagattctccattttagataaagacatacactcaatcgagaccaaaaaccacacagtcgatagatccttacatcctgaacagttggaaaagtggagagttgttaggcactgcaacatttgtgggtcttccatccattgtgggatctttaggccactatatccgtgtagttccaaaattttgagcttagcatgaggtttaagcgactccaacacttcttcctcgttgcatcccttgttttcaggcatgcaaaatttggtttaaagaagatgacgaaccggtttaaagaagatgacggcgtcgtcggcatagagcgaattatttggtgctctgctccactggttaactttgtcaagcaacccggctgacattgctttctgcaacatagcatgaagagtatccatcaccaggacaaaaagaagaggagataacggatccccttgtcttagccccctcataggcttgaaggggtcacttaaagtgccattgatgtcaatccttgtttctgcagttaggagaagagccgacacccaacctctccatctcctcccaaaacctctgtgttttaacatatccaaaaggaagctccatgaaactgaatcaaaggccttcgagatgtcaagtttaaggagaaccattgctttcctctgtcgatgaaattatcttgtcagcccttgaacgaaaatgaagttctcatggatagattggcctttgatgaacgatgtctgagtgcgagagaccagctcacccattctcggagtgagcctcagagcgatgaccttcgttgccaatttggcaaagccgtgaatgaggctaataggtctataatccttcaaaagggtagaggcctccttctttggcagcaacgtaataatcgctatgttcagcatttccaaattctgagagttggctgagcaaaatttcagcaacgcagccatcacgtccgatttaatgatggctatgttcagcatttccctttatgtttagcataaaggcatgcaaaatttactactaccccaagaaagtactagttcacttagatcttgcttcagatggagattggcatcttttccatttttcctgctatttatttttctcaaattgtacaattccaacctattggcaaggtgattcaagtctttgagctcctcaattccatggccaggttcagtgtccaaaataaatgttgttagagtgcgaagatttttcagtgtccaaaataaatgttgttagagtgcgaagatttttcagtaggctaatatttggtggcatccgcttcaatggacagctaaaaagataaagatggatgagcttgctcattgttctcataccttccagtaaatatctcagttttttgcaacggttcagccttagtgtttgtaagttatacatcgtgcatattgaacttggcagcacatccatgtcagacccagaaaggtcaagatatcgtagatgctttggattgatgacctggctatgaaaagagcaatcatgcatacggacagtacccaaagctcttaatgacatcagtcttaagtcagtaccaatatctcttaatgacatctgtcttaagttattaatatgtactggtaaccacagagttatcaaagtgcggagacaagatgatgttttgagcaatcccactgtttgactcattgctgatatgcaacgtccggtatatgcttcctgtgggattaactgttctgaaattacactatcatctgccacatcttttactaaatcatgcatcaaatcatgcattttgcaaacggaaaaaaaaacctttcctgtttcacgtcttggaggaaggatctccaaaccaaattacggaaaacatattcccccttttgttccaaacccattgtttcgtcttcctgaatgaaaccatttgccatccacaattggatcaacacttctttgtccatctcatggtcctttgggaaaactgaacaaaaggcaaagcattgcttcatttcaggtggtaggtgtctgtagctcaattttagtacaggtagtatatcatcttcacccctgtcattgtccccagtattgcttcttgcaattgtttcccattccttgacttgttgctttgaactcatcatatcacccattgtcttcaaagcaagaggaagccccttacatttcttgacaataagtttgccagcggtgaccaattcaacttgctgttgtacgcctttattgaatgctttctttgagaatagttcccatgaatcatcgtcactcagacaagctaggttatgggattctagggtgcccattatagatgctacttgttggctccgagctgtcactagtatagcacttccatcaccaccaccaacagaagacaggagtggctttaggtcttcctctcacttcttcttttcttcattccatacatcgtcgagcatgagcagaaaccttctccggccaacgaccttatgtagttccttttgcaacatgtgaaaccatgtgtggttatagttcttttgtgatgggaaattgacaagtaccggatgtgaaaccatgtgtggttatagttcttttgtgatgggaaattgacaagtaccggatgtgcaagaagtgtgtgtgtggactaacgttggtcaggttgcgacatctgtgccaagacaacggttgtttggttcatgtgtgtgcaggtgatcggggtcgatcttggtcaacggcggatcgggactagactcagggaggagttgaggtccaaagcgatcaaggatgccgggtgacaagattggacacaaggttgcacacggtggacgaacaccgtgtgaggaggtctttgcaacaggcttcacaaggtcaagtgtgcaagcatcggattcgcgaagaaatcagaagggactgtgcaagtgcattgctgctacagtacttgctgtaggtagcatacatgcatgtacacgtactgtacttgtgcaaggaggagcttgcattgtactggttgctactagcatggctcggtggaaaagtcaagctagctagctgtgcatgtgcgctgtgattggttggcagggaggccaagccaatccagccgttccacgtggcccaagatggtgaatggctcggctcggcaggcctgcatcgtccaagcagcaatggcccaagacggcggcccatggcgcatgggctcaggaggtgcaggcagcttgcatgcgcaaggacgcgcgcgggaaaaccgtacgcggcaacctccgtttcgcgtgactcgatcggaggcgggtgcaggagcgcgggacccacacgcgattttgcaagcgcgcgcgggagcggctcagcgggacgcgtggcggcttcgggctggttgggcgctggcgagcgcgcgctgaggaaaaggagacggaacgcgcacgacgcggctaggcaacgtggcaagtttggattcgtcaagacggagagcacgcggattcatcagcaagaagaccatgtgagggttcggatcgatgaggtggcaatcatctggagcttttcctttgagtagaaggaacaatggatggaccagatctgttctgagttagggtttcgccctaggggtatttgagacaatgtcttaggggtcttaggctataaatagagagatggatgcaagggtggaggttgctccttttggtaatcattttgagatgctcggtgagagagtttctgtgtgagtttggagtgtgtttgcccgagaggcttttgtattaggattagtttggagtgtgtttgtccgagagattttaagtttgtgttaatgttcctctgaaggtgtatgtttgctcctagttgagcggttattttgcatcacctataaatgaaatgatttgaaggatttcatttttgccttgtccatttaaattccgcaatttaaattccgcttgcaatttgaactttgcgatgatgagttttgctctctctttctcacctctcttctagtttcgggaattccttttctcttcctcctctagtttcgggaattccttctctcttctttttctctcttcttttctagatccggcttctctaatagccgcgattctagtaaggattttgagaaatccggcttgatgagtattttcgggggcaagatttgaattgctatattcacccccctctatagctgttcttggtctttcaattggtatcagagcccggttaagttcgttgtaacctaaccatggcaacgaacgcagctatggaggaaaaatactctgcgaaaccatttgttttcgatggacacaattttgtcatttggaaggcacgaatggaggcctacctccagtcgcaagggcataatgtgtggaataaggttacactgtgcccgatgatgctgacatcacgcctgcaaatatggctcaggttgattttaattatcgtgcaagaaatgcaatcattggtggaatttcttctggtgaatttaatcgtgttcaacaccacaagtccgctcatgacatgtggactgctctgtgcaatttccatgagggaaacaatgatattcaattggttcgtcagaatcaatttcataaagaatatcaaagatttgagatgcactcaggagagtccattgattcttatttcaaacgttttggagaaattatttcgaagttgagatctgttggaaaagaattttctgataatgataatgctcgccatcttttgaattgtcttgattatggtgtttgggaaatgaaagttacttccatcacagagagtgcacctctgagtgaccttaccatggacaagctttactcaaagctaaaaacccatgagatggatgttttccatcggaaaggcctcaaacactcgatggctttggtagctgatccctctggtagtacttcttctaatgactcagcttttgtgtatggtggcttctctcttgccgctttacactcagtcactgaggagcaattagagaagatccctgaagatgatcttgctctttttgctagaaaattctcaagagcttacaaaaatgtgagagataaaaaaagaggaaaaaccaatgaaccatttgtgtgttttgagtgtggagagcctaaccacaaaagagtgaattgtcccaagttgaagaagaagagtgacaagacgaccaagaagcccgagggacaagggcgaaaggggaagaaggatttgatgaagaaggcgatccacaaggtcttggcggctcttgaggaggtgcagcttagcgacatcgactccgacgacgatgatcaagaaaagggggacaaggacttctccgggatgtgctgtctcgccaacaacgaggacttcatcaacctgtgtctcatggcgcttgaggataaggatgactcatcggagcatcctgaggtatgtcttgatgatatcccttccttggatggttctctttgtgatgattcttgctcagataatgactctgttgatgatgaactaagcaaagaaagaatggcacacttgatgattgaaattagtgataagtataggtcttctaagtataaaattgagaaactaaaatctgaaaatgatggaatggcgctagaaattgctaggcttcgatccatgattcctgaggaggatacctgttctacttgtgcttcatatctttctgaaattaatctcctcaaggataagttgaaatcatgtgctttaggagctaggaatccttctagtgctagtgctgcttgctctacttgctatgaaatgaaagttgatatgggtttgcttgagatggaattgaaagaactaaaagaaaaatttgttcatgataggattggtaggtgtgaaaattgtcccattctcactagtgacaatgatgaattaagacaacaagttgccatgcttaggaccaagaataatttgttagaatcttttgctactaaggaacctattcattcttcatgtgctaattgtgctatcctggaaactgaactaaaagatgctaaaactgtcattgattctatcaaatctattgattcttgttcttcatgcatttctctgaaagttgatcttgagtctgctaagaaagagaactcatacctataacaatctttagagaggtttgctcaaggaaagaaaaagttgaacatgatcctagaccaatccaaagtgtccataaacaatcaaggtataggctatgattttgctgagtctttgaggataggtacccatgagattttaggtgtcacagatgggatgatagaactagctcaaaaacctataaccttcaagtctgcaggtttcattggaaacactagttctagtacacccaaaacctcagaaccaaagatggtacctatgactagcaagtctaagcctgtagagttacctagacccaaaaatccaaaacaagttgagcacaagcaaaaccagagacaaaccaagcctgtagagaaaaccaagtatgagtgcacctattgtgggaaagctggtcatttggtaggtttctgctttagaaaggctagaaaagagcgacaagaacgtcttaggactagaagagctactagagtccctgagaggttcgagtgtgcgtgtcattgtcgttcaagttgtgtatctcgctttcctcgccgagatgtgcaccctcgacgtgacctagcagggttggggcaaaacagacatggtcatcttgcatataattctgctcataacactaaagatgcttgtacttctcgcatggttcagtactggattcctaagtcatttttcactaaccccagtactgaatcatcgagatctgctgtgtccttcttgtaggattttggagtagggagaagtaattcttggcttgtggactccggttgctcacgccacatgaccggtgaagccaagtggtttacttctctcactcgtgcatccggtgatgagaccatcacttttggggatgcgagcagtggacgcatgatggctaaaggaacaatcaaggtcaatgacaaattcatgctgaaagatgtggcactagtaagtaagcttaagtacaatttgctctctgtttcacaactctgtgatgaaaatctggaagttcgtttcaaaaaggacaggtctcgagttcttgatgcttctgaatctcctgtttttgacatttctcgagttggtcgagttttctttgctaacttcgactcttctgctcctggtccttctcgttgtctcattgccacagagaatagggatttgtttttctggcatcgacgtcttggtcatattggctttgaccacttgtctcgcattagtggtatggatttgattcggggtttgcctaagttgaaagttccgaaagatcttgtgtgtgcaccatgtcgtcatgggaaaatgacatcttcctcccacaagcctgttacaatggttatgacagatggaccgggacaactgcttcacatggatacggttggtcctgctcgggtccagtcagttggggggaagtggtatgtcttggttgttgtggatgatttctctcgctactcttgggtctattttcttgaatcaaaggaggaaacatttggcttctttcagtctcttgctcgtagtttggctttggagtttcctggtgctcttcgagccattcgcagtgataatggctctgaattcaaaaattctgcatttgaatctttctgtgattcttctggagttgaacaccagttttcttcgccatatgtcccacaacagaatggggtggttgagaggaagaaccgcacccttgtggagatggcacgaactatgcttgatgagtttacgactccaagaaaattctggactgaagctatttctgctgcttgttttatctccaatcgtgtgtttttgagaactatcttgcacaagacgccatatgagctcagatttggtcgtcgaccaaaagtttcacatctcagggtcttcggttgcaaatgctttgttcttaaatctggaaatttggacaagtttgaatctcgatcattggatggcattttccttggctatgctactcattctcgggcttatcgagtttatgttctttcaactaacaaaattgtggagacttgtgaagtcacttttgatgaggctagcccaggagctagaccagaaatttcaggtgttccagatgaaagcatctttgtggatgtggattcagatgatgatgatgatgattctattcctccacctctagacagtacaccaccagtgcaagaaaccggttctccttcgactacatcaccttcaggagatgcaccaactacatcatcttcagcagctgaggagattgatggtggcacattaggaccgacagctccccgacacatccagaaccgacatccgcctgactcgatgatcggaggcctgggtgaaagggtaactagaaatcggtcttatgaacttgtcaattcagcttttgttgcctcttttgagcccaaaaatgtttgtcatgctttatctgatgagaattgggttaatgccatgcatgaagagttagaaaattttgaaagaaacaaagtttggtctttggtagaacctcccttgggttttaatgtgattggaacaaaatgggttttcaaaaacaaactaggtgaagatggttcaattgttcgaaacaaagccagactggttgcacagggtttcacccaagttgagggcttggactttgaagaaacttttgcaccagttgctagattagaagctattcgaattcttttggcttttgctgcttcaaaaggtttcaagctttttcaaatggatgtgaaaagtgcttttctgaatggagttattgaggaagaggtctatgtcaaacaacctcctggttttgaaaatccaaaattttcaaatcatgtgttcaaacttgaaaaagctctttatggtttaaaacaagctcccagagcctggtatgaaagattgaaaacctttttgcttcaaaatggttttgaaatgggggctgttgataaaactctttttactcttcatagtggtattgattttcttcttgtccagatatatgttgatgacatcatatttggtggctcctctcatgcacttgttgcccagttttctgatgtgatgagcagggaatttgaaatgagcatgatgggagagctgactttcttccttggacttcaaatcaagcaaaccaaggaaggaatctttgtacatcagaccaagtactccaaagagctcctgaagaagttcgacatggccgactgcaagccaatcgctactcccatggcaactacttcatcgcttggtcctgatgaggacgatgaagaagttgaccagcgcgagtacagaagcatgatcggctccctcctctacttgactgcgtcaaggccggacatccacttctccgtgtgcctgtgcgcgaggtttcaggcttctccaagaacatcacatcgccaagcagtcaagcgcatcttccgctacatcaagtctacacttgagtacggtatttggtactcctgctcttctgccctttcagttcgagctttttcagatgctgattttgctgggtgtaagattgatcgcaaaagtacttctagcacttgtcattttcttggcacttctttggtctcttggtcctctcgtaagcagtcttctgttgctcaatcaacagctgaggctgagtacgtagctgctgctagtgcttgtagtcaagttctttggatgatttcaactctgaaagattatggtctgtctttctctggtgttcctctgctttgtgataatacaagtgcaatcaatattgcaaaaaatccagttcaacactccaggaccaagcacattgagatacggtaccactttctccgagacaatgttgagaaaggtaccattgtgctagaatttgttgaatctgaaaaacaattggcagacatttttacaaaaccacttgatcgctctcgttttgagttcttgcggagtgagttaggagtgatccacccctatggcttgatttgagggggagttgtttttcttttgcatgcatttgtaacatattgcatcatgtttactttatgcattgtattatacactcttcaattgagctttgcttgttatctcttggtcatcactatgctatggatgtatcactcttatgctagtttgatctcttgtctagctttcatttgcttaagtagcttgtgtgatcatgttatgctgttcaagcgtgttgaaacctgcttaaattaactattcatttgaactcaatcaatgtgcaatgcttgctctagaagtttgtttaaattgaagtatccatctcatactcatgccatgtttacattcttttcgcaataactgtcagtacatgcttatgaatgctcatgcttatgcgtccatactttgtatcaatcatgctttacaagatttatctctgttttgtccgggctactgagtgcgtttacgcatgagtagtgccgaagatagcactgagacagcctgtaatgggaactctagctggaaaacttgattgaggtcagacggcagtgtttggcacaaccatcacttgctgactgataagatcaggtggaccgtcgtgattgtgctattgtctttaaagaaattaaaaaaaatcataaaaataaaagtcatgagaaaagattaaaagctcatgttctatgctttgttatcatgttgatactctttatgaactgggcattagcacattagcatgggttcattgctttgattatgtaaatcttgcatgattatgagctggtttgcttccttttaagcttcttctagaaatagctttgcacactaaatcactaattcacttgaaagctttttgcttgctggcgatactaacttgatattcatgacttgtttcatacttcttatgcacatgcttagctaggcttgagcacatgcttgtatctgtgtgatccatgtctaccttttgatgcctttagataactctcaaagctctcaaaacctaaaatttgcaagtttcatctcatttttatcttgcatttttgtctcttttgatcttgatagcatcattgacaaagggggagagaaatttgcacttattgaaaattaaaacttgctttaaatcttggtgaaagggggagtttggcacatagggggagttttgcatttgcatccctttttcttcttgtcacttggtcttgatttttcgcgatttcaaaatgaccaaagttcgcttttgcaaaatggtttgctttgtgaatcaaaaatcaaattttcaaaattttgcttgagattgtcaatgttcccatcaagggggagattgtgaaaccatgtgtggttatagttcttttgtgatgggaaattgacaagtaccggatgtgaaaccatgtgtggttatagttcttttgtgatgggaaattgacaagtaccggatgtgcaagaagtgtgtgtgtggactaacgttggtcaggttgcgacatctgtgccaagacaacggttgtttggttcatgtgtgtgcaggtgatcggggtcgatcttggtcaacggcggatcgggactagactcagggaggagttgaggtccaaagcgatcaaggatgccgggtgacaagattggacacaaggttgcacacggtggacgaacaccgtgtgaggaggtctttgcaacaggcttcacaaggtcaagtgtgcaagcatcggattcgcgaagaaatcagaagggactgtgcaagtgcattgctgctacagtacttgctgtaggtagcatacatgcatgtacacgtactgtacttgtgcaaggaggagcttgcattgtactggttgctactagcatggctcggtggaaaagtcaagctagctagctgtgcatgtgcgctgtgattggttggcagggaggccaagccaatctagccgttccacgtggcccaagatggtgaatggctcggctcggcaggcctgcatcgtccaagcagcgacggcccaagacggcggcccatggcgcatgggctcaggaggtgcaggcagcttgcatgcgcaaggacgcgcgcgggaaaaccgtacgcggcaacctccgtttcgcgtgactcgatcggaggcgggtgcaggagcgcgggacccacacgcgattttgcaagcgcgcgcgggagcggctcagcgggacgcgtggcggcttcgggctggttgggcgctggcgagcgcgcgctgaggaaaaggagacggaacgcgcacgacgcggctaggcaacgtggcaagtttggattcgtcaagacggagagcacgcggattcatcagcaagaagaccatgtgaaggttcggatcgatgaggtggcaatcatctggagcttttcctttgagtagaaggaacaatggatggaccagatctgttctgagttagggtttcgccctaggggtatttgagacaatgtcttaggggtcttaggctataaatagagagatggatgcaagggtggaggttgctccttttggtaatcattttgagatgctcggtgagagagtttccatgtgagtttggagtgtgtttgcccgagaggcttttgtattaggattagtttggagtgtgtttgtccgagagattttaagtttgtgttaatgttcctctgaaggtgtatgtttgctcctagttgagcggttattttgcatcacctataaatgaaatgatttgaaggatttcatttttgccttgtccatttaaattccgcaatttaaattccgcttgcaatttgaactttgcgatgatgagttttgctctctctttctcacctctcttctagtttcgggaattccttttctcttcctcctctagtttcgggaattccttctctcttctttttctctcttcttttctagatccggcttctctaatagccgcgattctagtaaggattttgagaaatccggcttgatgagtattttcgggggcaagatttgaattgctatattcacccccccctctatagctgttcttggtctttcacaacaactcgacgttgtcaagcagttggcatgctttatttgtagccaattcaatgatggatttcagaagggaaacaacttcaaagttgtctgacacacagtgccacatctttagctcgaagtgattctgaaccctgtagtcattgtagaccatcttggcgagcgttgtcttgcttaaaccacccatccccacgatgggaggttctcccacttgtgctgatctcgctgatcgagcaacagtttgatcaccaccgcctccttgtcgtcgtctctgccaaagatatcatctaattcatttgatggcagcactgagtacgtctgccagtaaggaagttgatgtactggctcatcttgcagcaacaggccaaacatgttcatctcttcaaccagctcgttgatgttcttgagcactttggcaagcttcctgctcatggtaaaacggaactcgagtggggtcatgcagcttcgtaccttgtgtcccagtgactcgaggctcatggcctcgcggcgcagcgcctcgtactggaactcgttgagcatgtcatcggcctcgtcggcggcggcgttgaggtctttcatccaacgcttgatggcggggttggtctcgctcttcaactcggcgtccgccagcagctgccgctctagcttagggcggtcgccgtcgacgccatacatgcgggtgactttctggacaagcacgtcggtcgccttgccgatcaccccgcacaccacggggagaagcagcgattccgccatgctccatggggactagttcttagctgcaagcctccctctgcaattgctctctttcacaggctatctgctactctctctgctacctacagatctagacaagtcaagatgatatttttggctgtcaccatattcaatgattcatatgattctcaagttgactgacttttgtgatgttgtcccttcacagtgcaggaatgtggcgagttggcacagctcgccacgtaggacagctgctaatgtggcagtggggaccatttctttgtgaggaatacgggactaggccttgttgagatcccaaaaattttgggccaaaacgtcacatcggatgtttggacacatgcacggcgcattaaatgtggaaaaagaaaaccaattacacagtttgcatgtaaattacgagacgaatcttttgagcctaattgcgacatgatttgataatgtgatgctacaataaacattggctaatgacggattaattaggcttaataaattcgtctcgcaatgtacatgcggaatctgtaatttgttttgttattagtctacgtttaatacttcaaatgtgtgtccgtatacttcaaaaacgttacacccctggaactaaacacatcctaacttgagacacgagaagctcaacggaaaaagcagataaaagcatggaatccaggctgtagaccatcatccccacctccccaccatcgaaacaaacctctctctccaccgtcggagtcactgtcgctctggatctgcgccgccactgtcaccctcggcgctctgtctcctcatcaccggcaggaagtggagggcaccgacgagctctcacgccgcttcggatcctcgctgccaccgtcgtcctctgagccctcgtcgctggccgggaatggaggggccccggaagctctcacgttgatgccgttgccctccgagccctcgttgccaaccaggagaggaggggccccggcgagctcccacgctgctgccgtcgctcgctgagcgctcgttgccggccaggagaggaggggtcccagcgagctctcgcgccgccgctgtcgcccttcgagccgctgtttgggaggaggttggggagccgctgtcctctgttggagctcgctgtgctgccagccgctgttgagttgtggtagttggggaatagagagaatgatggaaggggagaaattgtatccttgtttctgaattttagggtgtttagtgctaaattttatacgttatgtagtttaaaaacatgtgaggacaaaaatagaagatggcaaaagctgacatgaaaagctaagaacacccttagggcattcacattgcgccgatgtggcgttcagcctcctccccaaaccaaatattcgttgccacgtcatccatccacatggcctcctcaagaacgcgaagcaagttttggctatgagttcttcgtctcaagtggtaggacccacacgtgctagaggagagaggggagaggagcgaggaggaggggagatgcagcggcgtgaagccatccccgaccacgccattgtcgttgcacccgtgcagtactcgaacttggccaccgccatcatcactcgctggtatgctcacccgagcgcaatggcatggagtgcagctccggccttcgagcacgatggcggggatgacaaacgaaggcgaaagaaacgcgccatggtggcaagggagggcccggcgatggtgacggtggcgccctacactagtgtgaacgaaggagatggatgagctgtaaatttgacgggagtggtatgaaatgaagaaattcgctatcctagtggtaaaatcttaatggcttacgaattaagtggtaaattcttaaatgtaagcgtattgaacgggagaagagtgggcggcggccacggctccgtgagatctaggcggcgcgacgcatcgcgcaagagagagcgagagagatgagtgcggcgatggaaccctagcggccgggagttttttcgttttctttttcgttttcttttttgacgcggctgggggtttccggagggggagagatggcgtgtaagaaaaggaaattctacgaaaagacccctcagtttccacgattcagggcgcggtccttttttctcatttttgtcacgttcgtattagatttcgtagaaatagaagggtctaaacgtaatatatttaaacaggaacaagtacggcgaggacatatatcaaaatagctataacggagagggcttttctgcaaagttcacagaatcatcgcggactcacgagaggccgtgaaatctactcgccgtcccacgcgcgctgacgtgccgtgctccggcagcatccacgccagcgcaaaactcggacgagcgagcagcggggggaggttttaatactttagatgctatgcccattgaaaaatgaaaatgaaaattaccgaggaaaatgagaagaaccgttttcgtatttatttattacaaataagcagggatgaagccagcaggtagacccgtatatcctaattttgagattcatgagagctttctatctatattgggcttatcgaagaagatgaagaggatgatctgtattagggagaagataaagtggtacgcgctcggtcaaattggttgatttggcgttacatagtgcgggcccataggtcacttgggtacttttggactactctctccggtttgaaatttgttggcgttttagctcttgaaccattgtattgtgtgatatttcttgacgttttagctttttttttttttttttgcatcttggacctgcttgccctgcatgcatgcagccggccattactcccattatttccaacgtcatgcatgctgcgcggggcgctgccttctattcgcctccttgcactacttttcgccatggagcaggtcgtgcaggacgccaccgctgccgtggagtaggtcgacgctggcgccatggtggtgaagctcgcacaacaggtggacggcgccgccgttgtggttgacgctgccggcgttgtgcatgagtgcaaaaataagtggacaccaagaatcgaacttaggactagtagctttagttttgcatgcgatggccactcaaaccaagagcaggttgtggtttggtgtacctcgaaaccgtatttgttaggggtaaaacaggaagtaggaacactaattaatcactcattggtatgtgtaatcctgtctaaaacgtcaacaaattaggaactgaagggggtaggaggttagaggtagcagcgaggcgtgattcggccttgttttgttcccaaaacaaaaattttcacgctatcacatcgaatgtttggatacatatatggagtattaaatgtaggaaaaaaacaattacatagattgtatgtaaaatgcgagacaaatcttttaagcctaattgcgccatgatttgacaatgtggttctacagtaaacatttgctaatgacggattaattaggcttaataaattcgtcccgcagttttctggcggagtctgtaatttgttttgttattagactatgtttaatacttcaaatatgtttccgtatatccgatgtgacaaccaaacccaaaatttttttccccaactaaaccaggcctcattcttcgaaattgctaattagcgcgtatgcgctattagcacaagcggcgcgagtttctggcccacccccacgcgcgtcccatctcttccttttttttcctttttttctcgcttctttttttttccgccgcgccgtgaaatgtttttttgccgattttttttgtgatctttttattttagaaattgaatctttcatctttaattgctgctgaaagttttgaatttgagttgaaagtttttaaaatttgagttgaaagtttttaagttttgagatgaaagttttcaaatttgagttgaatgtttttgaaccttagatgaaagtttttaaatcagagttgaaagttttcaaatcttaacttaaatagttgaaagtttttaagatttgagaagaatgtttttaagtttttagatgaaagtgttcaaatttgagttgaatgtttttgaatctgagatgaaagtttttaaatctgagttaaaagttttcaaatctttagttgaaagtttttaaatttgagtttaaagttttcaaatattgacttgaaatttttcaaataaagatttgaaagttttaaaataagagttgaaaacttttagatttaagttgaaagtattaaaatcttggcttgaaaattttgaaatctaagttcaaatctagacttgaaagttttcaaatattagttgaaaagtttccaaatcttgaataaatcaaagttgaaagtttgtttcagttaattaaacaaagggaagaaacatacgcattcttataaaaaaaaaacagcgctaagcgctcttagggccgtgaaagtgcgcgctgcctctgatgctagcgcttaagcgtgtaacaggaacccccctcattcatttggtatttgggggctagggttgggatggaggctatatgcctgaaatctacgaggcagatggtgtgaggtggcgatgcgaccacacaggggagagtgcccgaggcattaggctaccagcagaatgcaggcgcaagtcactggcatgggcaagtcaactggttctagtctattattgctactctgctcatctcgttcgctccttagctaataaccttgtgctaattagctaatggccttgtgctaaccaatgaggattctgtatttttctctagtatcttgctaatcaagaatgcacttttatgttggcaatgcactcctccgttttcttttctatttgattatgttaacattgaattcgatgtaggtaaaggtacgtactttactttgcttttattgacttagggcctgttcactttggcatagttgccgaaattttgacaacttgtcaaaattttgacagcatttcttatataattaccaaaatttaaaaatttgacagtaaactaaatgtagccaattttttagcaactttaccaaaacttggtaaggttgaaaataacatcaaatcaaagtgaacaggctcttagacttaaactttgagcctatcctcactatagtttgactagatgtccaccctagcaatctgcttgagagatactccatccgtttcataatgtaagattttctagcattacccatattcatatagatgttaatgaatctagacacacatatatgtctagatttattgatatctatatgaatatgtacaatgctagaaagacttacattatgaaacggagaaaatagaatcataaggcttcttccaccaatttggactatagtttgtaaggttgcacatagattttataatatttaattagattccttggtacgaaatgaaagtggttaggacattgtaataccaatttgttgcaggagctagcctgaccaccgttcaactgcgtctgcagttttattccttacctcgttgctcggaggcaaagatgccacgtgggataaaaccaccttcgaaactgctcggggagtcgatttgcaatgggttatacccgattttactgttgagggatgcgattcaatgaggggcatgagttgagggagtcaatataaacttatttctccaactttccgtcagttccccgtcccttagcacccacccccaccgtacgcacaccaggccaccaccaagaaacgatggagaaggcctcggtccatcaaagtagcccatctaccgatcacacctgaatttttttcatttttaaatttttatttttaatatttacagaaatattataccggcaaaaatatttacaaaaatagacccagggtgacgtgagagacagccgagatgcaaaagaaaaattagcaaaatgcatttttaacatggcgaaaattgcatttagccccttgtacgagggcggcaagagacctcaatgaaaaatgtgcacaccttgccgctctccactttggcggcaggggggccatttctgtaaatattttaaatggtataatatttctgtaaatattaaaaaataaaaatttagaaatgaaaataattcatcacaccctttctcgcccgacccgttcgttatccactgaactctctccccgagcaccgccaagcagctctccactcccaccatgctgctgctccactcctctccgcgcctcctcctccgccaccgcctcctcctccccccgtcccgcgacctcctccccgccgcctccgcctccgccctccgcctccgccgctccgtcgccgtccgcgccgagccggagctgtccacctcggcagccgagcctcccccgggcgacgacggcgagggagatggccccgtggagctccgcaccccgacgctcttctccatcgacgagaaccccaccccgctgcagaccgccaccagcgtcctcctcaccggcgccatctccgtcttcctcttccgctccatccgccgccgcgtccgccgcgccaaggagctcgtaatcccctccctcctcatccacctgcgctgcgctttctcgactggagaaaaatggtctaaaaatcctttttgcttccgtgacacagagggttcggtccggcggggtggagaagcccaacaacctgagcaaggaggccctggaggggctgaggctggtgagcgcgtcgccgatcgaggtcgacaagccgccgtcgcccgtgcaggcgctgctcggcgggatcgccgcgggggtcatcgcgctcatcctctacaagttcaccaccaccatcgaggccgcgctcaaccgccagaccatctccgacagcttctcggtcagctctcttccccctccacaatattttagtatttttcttgttgcaacaatatacatgttttttttacagcacattaaattgatttaggctgtttagggctcctttcaaactaaggtttctttgagaaattttttagaatatgaatatccttttaggaagatttgcctatgttctcctttggaacaaaggaccgaaccctttgaacttccattggaattgccaaattcatataagttttggaggaaatctagcatgagtaacagggatcttgaggctgtgctgtatgtgtccgattgtgtctgtgatgacaagtatctgtgttgctttgatttttgtcagacttcactttatcggttaatccttttgttgttccgacaaataaatgtataattgtatatacgccattgtttggaactagtttgccatgtctatgcgccattgaacctatgtgaatagctacaaataaattttatggagtcgtggacaatttaataaaggttgtgaactaaccacatggatgataattcaatatatcatagtggacaatgaatgctggtttacataaaccattaaggctgtgtttagttcccttcaaactttcaactttttcgtcacatcaaatgtttggacacatgcatggaacattaaatgtggacaaaaaaacacagcttgcatgtaaattgcaagacgaatcttatgagcctaattacgccatgatttgacaatgtggcgctacagtaaacatttgctaatgatggattaattaggcttaatagattcgtctcgtagtttacaggcagaatctgtaatttgttttttattagtctacgtttaatacttcaaatgtgtgtccgtatgcgtcaaatttttttgccaaaacaactaaacacggcacaagtgaagttgtgttagagctatgcagttttctggtcaaaggctgaaagtgtaagtgataaagacttcaacaaaaatagtttattgcaggccaagtttgccgatgaaacttgtgcggctatgttatctaggccgtgtttagttccaaaataattcttcgaacttccaacttttccatcacatcaaaacttttctacacacataaacttccaacttttccatcacatcattccaatttcaaccaaacttccaattttggtgtggtgaacaaaacacagccctaggtcgacacttcaattttcgtagcagctctgatgaagtgtggagtgtggaccataattcagtgtggtaacacttattttgtgggaataattctatattcttgtaaggattgcagattagttttgagcaatttgaacccctctaccttatgctgtttttgacatttttttggtttcaaatgaattttccaacttgaagtttgcttcatttgtattattacctgccattttcttgttatccttcgttaatggtctagtagaagttagcgctactgctatgcaatgctttgagtaattgtctgctgtaatcaccatccatttttttgtcgccaatgtgccttgaagtttacagcaaggaattgaatcccatttcaatattatttcacaaatggagaataaggcatggaaaatgcaaattattgttgtgttttaccaacacatacaaattcaacaatgatgcagggaacaaatactaagagagctgcaacaaaaattatttcttgttgtcctcccgtgggtcggttaacacatttatgcaccgtaaaatgtgctatttcgtgctaccaactttccatatacttacagaggaactgaatttcagtcttcgtcatattttttgtaactagcacaattcatctaatggaatcctccttttgttttctgcaggttcgtcaaataacaataacaataaggtacaactccattcattcactgttctcttgtttgttatatattgtaatccttttatctaatgaatgaaccacgttttctctgcagaacaattataaatgggatatgctacctagcaacatttgtgtttggaatcaactcaattggattagtactctatggtctccagctcacttttgcttctatcatgggcgatgacaattccagcagcgctgcagagaaaatcagtgagcagtccaacacaatggcatcatctaatagctccacagattcaacaagtgacaacgaatcaactagcaatgataagagtaaagggtagctggagtggaccgtgcaaatgcactagccaaatcttggagtacatacaattggataatctttgtgggcatttagttttctcatcttgagctgtagtgtcattgtatagcgcaaatatggaccaattgaattgcaattactgtagtaacatttcggctgaacatgtacaaagaaaaaaggtagcaagcagtttttttggggacactttctgattgcaactggatgaatatttttggcagaatctacccttgtacttgtggaataacattataatgaccctttgctgtgaaaataccatcttttagaagcctgatgctcgtgttgtgttcatggaagatggcagattgcagggatatttggcgatagtatgggcgcggttcacttgtggttacccaacttgaccttgctcttgttttacaagatcagctataaaatgtgttctttctgatgcatattatctatgtatttagttcatttcgctcaactagtgggataccctcatacccatgatcattccagtagctagcaatttctgctgctaattaacatggtagataaactaagcagattgcgattcataacatcacctggtgtctgtgaacagattttccattagcagtttgttgcgaaatgataccaaccaagatcagcactgtctgtcacagctgatgctgattatgaagaaacatgaaaggtccttgctaaaacactactccgcaaagctactcattatcctggcaagtagtagtagtactagtaaatacctagcacatcaccgaatcgctggccggcggcgttcagcggcggaacgtggatcactggccgccacggcgacgcttgctggccccggcggcggcgccatcagacttgagcacctgcgtccccagcttccgctcgtactccaacgcctgcctcgcctcctccagctccctcgccttggcgctccccagctgcgccttcaggcggctgatctctccctgcgccttggccagagccttgtccttcgcctgcagctctgaccgaagcacgccaccgccggtgctgacgccatcgcccagcaccttcctcttcttcccggccgccaccgacgaaccccgtgaagcttccgtccctggaagcaagaaagaagaaaacaatcgagcaattgaggaatctgcaccatccgatgtacgttttgttggtggcatttgatcgtccgtccgtacctcccagacatgccggggcgctgctgatcttggcggcgacgaggttgctctccgagaggtaggtcttgaggtcgacgacgccttggccctgcgtgagccgccgcgccacggcggcctccctctcggtgagcgccgggtcgctcgtggcctccttggacggggttccccagcgcacggggcagcgccacggcgcggcgggcggcggcgagacgaagaggaactcctccttccacgccttgacggaggacgggaggcccgtgaacagcgcggggacgctctccctggcgcggaaggagtaccaccccttccccttgggcagcggcgccagggtgaagaagtggcggaacaccgggagcgacggcgcgccgacgccgcggaagtggcagagcacggcgaacccggccaggacgcgccacccgttgggcgccagctgcgacggcgcgatgccgaagtgggccagcgcgtcgctgacgaacgggtgcagcggcaggcgcatccccgccgcgaacgcctgcgcgtacacgcagatcggcaccgccgccgccgccgcgccacccccgcgcccgccacgcggagtcaccggaggcggcgcgcacgcggtctggttggccccggcggggtgcaggccgaacccctcggggacgctgtacctggcgcggatcccggcgagcgactcctgcgtgcggagcgtggacctgaagggctccaccaccggccacgagagcgccgtggtctcctccgcgcggtcgtggacaccccttcccactctcgggcgaggcagcggcggctgcttcaccaccaccgccggcttcacatcctcgccgccgccgtaggaggccgcagcgcgggcgtcgtaacgccagtgctgcgtcaccgccggcttgacgtcgccctcgtcgtcgtcgccgtcgaagtaggtcgacgcgtggtggacgacgtggcggtggtggtggtgggtggaggaggaggaggaggaggaggaggaggagtggaaccacgacgacgacatggcgtggagacggggaggggagacgatgagtgggggttgcaagtatttttgagggcggttggattgcaggaggagaaggagaggagccgcagagacggcggatttggtgcgaggaggccgttgcgctctctctctctctctctctctctctctggcgggtttccttccgatggaagactcgttcgtatttacggcttggattggatcggactccacaggtgaacgttgcagatttattcacattttctttttcttttttctcttttattttaaataaggaaggggactgttacgggtttgacatgcagccatgcaaaagttgcatattaactttcctcccttttcaaaatttgacgctgtgttcatggtaggatatttggtttgggcctgtttagaatccaatttttttctttaaactttttgctttttcatcacatctaactttcctataagggctgtgtttagtttttgtgctaaaatttttttaagtatacggacacacatttgatgtattaaacatagactaataacaaaacaaattacagattccacgggtaaactgtgagacgaatctattaagcctaattaatccgtcattggcaaatgtttactgtagcaccacattaccaaatcatggtgtaattaggctcaaaagattcgtctcgtgatttacatgcaaacttgcaattgtttttttggtccacatttaatgctccatgcatgtgtccaaacattttatgtgctgaaaagttggaagcttgaaggaaaaaagtttgaatctaaacacggcctgtggcgtgtttagttcgtgtgccaaaattttttaaagtatacggacacacatttgaaaacgtagactaataacaaaacaaattacagatttcacctgtaaaatgcgagacgaatctattaagcctaattaatctgtcattagcaaatgtttactatagcaccacattgtcaaattatggcgtaattaggctcaaaagattcgtctcgtgattcacatacagactctgcaattggtttttttttgtccacatttaatactccatacatgtatctaaacatttgatgtgacggaaaagttgaaagtttgaagaaaaatgtgtatttagttcacgccaaaattggaagtttggttgaaattggaacgatgtgacggaaaagttggaagtttatgtgtgtaggaaagttttgatgtgatggaaaagttggaagtttgaagaaaaagtttagaactaaactcggccaaagtttgaatctaaacaagggccgagtttacttccaaactattttaacttttttcttcaaacttctaacttttccgttacatcgaactttcctacacacataaacttctaacttttccatcacatcgttctaatttcttcaaactttcaattttggcgtggaactaaataaaagctaaggtaaactaataagttttaaaacaggatcaaaactaatagaccatggctgtgtttaggccgactttagttccaaaatttttcttcaaacctccaacttttccatcacatcaaaactttcctacacacgtaaacttccaacttttccatcacatcgttccaatttcaacgaaacttccaaatttggcgtgaactaaacacacccttagatccacgctaatattggaagcctgaagaaattggaacgatgtgacgaaaaagttgaaagtttgaagaaaaaacttttccgtcacatcgaactttcctacacacacaaacttttaacttttccgtaacattggccgagtttagttcccaactttttcttcaaactttcaacttttccatcacatcaaaactttcctacacacataaacttcaacttttttcttcaaacttccaattttagtcaaacttccattttggcgtggaactaaacatagcctatgtttcgtgaaaaccttaggtcacatacactaggaaccctatccatgtcccagatctggccgccaccctctgcctgctcgagtccatcgccacttcaacgactcaggccacgccggtgcggcatcccgtcctccgtcccatgtttccactctcctcatctcatcctccccgctgcttccttgccaccgtcgtctacaccggggtaccgcgccgcgccatgcgaccgtcgccactatagatagccataaggctcgaagcccgacggcccggtccatggcacgatattttggcccgacccaagcatggcccggcccgacgggggtcgggcccatgccggccctgcctggccactaggccatgcctggcccccccccaccggcacgttgggccagcacggcacgatgggtcgacaggccaagcccaacacacaaagcatagggagcaaaaatagacatattatatgccacggtccaaagaatagggatgtaaaatagacttatttttgctatatatatgtcagcccaaagagaagggagggaaaatagacttattttagctatatatatatatatgtcacagcccaaagagaagggagaaaaaaatagaattattttaaaaaaggcacgatgggccacccgtgccttcgggccgacctggcatagcccgactgctggtgggccgtgcttgggccggtggtgcagcccatgggccggcacggcatggctcggtgtgttggtcgggccatgccatgcctgggccgtgccgcttgtttggctaactatagtcgccacccccaagcagcaccaccgctcagctgttgtcacggtgtcacctactccaacacatttacgcaaagattttcgttatcgggattgctatatggcattcaaatgaaatttggggatgaaatcttacagattttagaccattggatccatgccaagattcgtgcatcggcttctctccaactccgacaggctccccttcttctccggcgccagcgacaccccgactccagagggttagggtttggagtgagggtaggaggggggatgggggagggggaagagggggtttcctcggggcttagagggatggccgtgggcggcagaggaccggcggtgggctgtggactccggcgagcggcggaggaccggccgtgggcggtggactccggcgggcggcgaggaggcggcggcggcgccgaagccgcggggatggaggagggcagtgggccggtgttggcggtgggggtaaagcaagggtgggattaggtggcggatccggcggcggggagccgccgaagacggggaagaccgtgggacggggacacctcatcgtcgccgccatgaggagaaagtgaggggggaaggggagggggaagggggagggggagggggctcgccggggggccctccccggcgccgttgaccttttccggccagccgacgaggcaggcggcggcgcggtggggcggtggcagtggtgacggcggcggatcgcgcgtgggacgggagaaggagggtggcggcgtgatctagaaaccgggggaggaggaggaggagtgagggttaaggggctgcatgaatcttaaagcacatccaatggtttaaaatttgaatgataggaggtgagattttccgtcacatgatatatagacagccccgttagttattgttgacgctaaagtacgattttcatcgggtccatctatatatatgacgccacaaaatttagtctcggattggacttcacactgattaccgccatttcaaacacaaagttgaccattaacgagccgtggcaatatagcaaataagtaacttgattataatacacaatataaattaaattaagatagaaaactagcgatcacaaaatttacacttaagtgcagtgtaattttaatataaattacaatgtaagtaaggtgtaagtgcagtgtaattatagtattaaacacaatttctcaccataacttttcttatgggactatctatatacatggcaccgtattttttatcgatatgtatttacattataagtccctaaaatttacatatataattttaatatattttcactgtaagtttcaaaattacatatgtaagtcctaaaattatatatgtaattagtatgtaattacaatgtaagtggcatgtaagttactatagtgtaatttttattaattataattactttgagtaaagaacgagtaccatctttgtgctcagttggtcaaaagccttttgctgtaacttatcgatcgtgttttctcttggagagcactcgcacgaatcttgaaacatatcctagggtctaaaaattgactatttttttacacaaaaagtggcgccatatttctagcaactctgtgtacattagtgtttagccatgtattgttgttgccgatggctaaatgaaatcattattgctgcatgttctataataattgacgttttggacaaggttaaggtcaaacttttataattttaaccatcaataacttttaaaatatttagtttacataaactagaataagatacactataataaaaataaacatgcatttatttattatatatattataatagaaaaataagatcaaaggtatattttgtaaaccgtgtcattgtctaaaatatcaattaaaatgaaactggagggagtatagcattggtatgcttcttgctgctttctatcttccgtatagcattgatgttgctgataattttcggggatgggcacccagcgggtgcttcttacccaagtggggacgggacgaggagaaatcttccccgtgtgcagggatggggatggtgacggaatatttttctcactctggggatggggtagtagaacccgacgggtgcagcctcgttgccatccctagatctgtgtgttttcatgggccaactgtccttcggacatgggcctacagttgatgggttaacatgcaagcaatatgggccaacggaagtttgttggctggcctacataggctaaaagaatatgcctgttagtttttaatgtgtgtcctgtgctatgattgtacaacggtgactatctgggatgttaaaattgaaagtttaaattatggtgatttcttatgaaattcaaagttaatacttatggatcttacattgtactttaaaacttataatggaattttgaaattacactgtgaacttatcaaattcacagtgtaatatcttgtaagttatagtgtaatttataaaactagtaatttgtctgtgctaacactaccgtaatatttgataatgcatataaataaactaaagagatcatatattatcgcaatcaagcatataattagataaatttaaaatgcatgtaaaaaaatcgttcccatgggcggcaaatcctgaatattgacgaagtcaccacaggtgcctcgctgttgacgggtacatcgcctatcactgaaagcacaataccgttaaaacctaaaaaaatcgtttccatgggaagtcaaacccaagaactaaggtgctactgagactcttgtaaccattacttattttttattttgttattaaatacatagccacacgatatcatcacaacttctatatgttcggatccatctaattcttgggctaaaaaatttttataactacatgaacataatttgtccatgatgcacagcataactaatctttggaaaccagcatccaatcagcaccttagaagcttgtcggattgcctgggtcatcatcctcgtggagttggggtggtgatcttgtgatggctggtagtgggaaggtggctgctgccccttgccaaagtagttctggtaccccggaagaggctggctcgactggacacggctgtgagtaatcttcattccacagcaacaacccaaaatatatcagggaataatatctgtacccagttgctgtggaatcataatttcttttacaccagttgtaacatctaagcaaaatgttggtgtatttgccgctcactgccagggcagggatatcaagtggagctagcagagcatataatggctgtgccaggagacactcacgctgctcaaaatccaatcggggaggacactgcatacagggatacctgagtcaataaatgatgcatatttgacatgaatttaacttcaaacttgataatccaactattatcaagcatcacgttgaaagtatcatgcataagcatgcaaaattatacctaaatctgaccaatttgtcatatagcttgcagagttgttacatgaagcgtggtaccttgctatcaaagaaggatctagatgtatattaaaggtggacctcacatagtttggtcaactttaattgtctgagttcaataaagttttcattaactaaaaaagtcaggtcaacttgataatatggctatgacagagcatattgatacttaaatctatactattatgacaagcagtttgatgatcttaatgccgatgacggtctgaaaacctcaaggctagcatataaatgaagcatatccagggccggccctggccctatgcagccgaggcgacggccggggacccataatggtgaggggccaacacctaatactagtaatctagtacgtcatccgatattgagatcaatgatttttatttagaattaaaggtgttgcaagtgagtttgctagattcttcaatgtccgcacctgagattctgaagtttgttatggatgcagatttctattcaaatgtttcagttgcctatcgaattctcttaaccgtacctgtgacggtagcttcagctgaaagaagtttctcaaaattgaagttgttgaagaactatttgagatcaactatgtcgcaagaaatgttaaatggcttggctatgtactcaatcgagaatgatatcttggacaatattgatcttaataccattcttgatgattttacatcaagaaatgtcagaagaagtatcttttcataggaagcaatggaatagggttctattcttcattaagttaatgaataatgatattagttccaagttacaaatatattgttattttggtcgactttatttcttgataattaccaagcatattaaatttaatatatggatgtacttgtttccgttttgtaagtaaaattagcgtatatatatatcaataaattttatatatagcttagagggcccatcacgatgagttcgcctagggccctcaaaatcataggactggccctgagcacatctgttcatattaagattgagtttggaagaaaaggagcctatttagccatcttatcacatgagctgatattttagcaggataaatcaagtataacactcagtacctacatgataatgaatgccttacattgagagcgaatcaactcaaaagaaaatgaaccacattaacaatgagaaaccatcaaaaattgaagagattgcattggaataaaatcaatggtctggtctgagataaaaattaaagcaaaataggcaagaggtaagaatgcaatagggtagtcattggattttgactctttctttcaataaaattctgttttccatatagattttttctgtctctagatgtttactcttgattttagtaaattctattggcagtgtaatcaaccaattctagaattgaacagaaagtcaagataaatattaccttagagacacacccttactcccacaaaatctcagaaaataagatagtatgtagttgaaacacacaacgtagctgatacaaatggaaattagagatccaagatctacaggttaagaagtgcgctctgaatactgatgaagctatgactgcataaacatcccctgagaaacctgaatatcttttgcagatcatgatgcttactttgtcagttgtcacctttaaatcttcttagatcttctattatgctttgcagtctacaataagattgatagatcccaaagtatttataagcaggaagacaaaccccagtatctaaatgacaccaaaatgttagtatatcaaagaggtatacaataaaatgatatgattggtgaaatgatccatttcttatgacatgattaataatacacaatatggatgccattccatgaaagattggaagtgagaaagcacctggaaagagaaaccaaatcatgagaactcttagttccatagatgcatggctgtaccttcctaatagtttttttttgcatggttcttaataggatttgaacaattgaaaaaagccatgcttgtgtaacaggaaacgtaaatacggtatgaaccccacaatagatacaaagaaagaatctgtacaacgccacttctgaacttcttttaagatacaaacgaaaatataaattcagtacaaacctagtaatagatcacatgttagctcttgcaaagtaaaagtttacaattgttagtatcttataacaattggttagcttccagagaccacctcgggttgctgagtttcttataacaacctgtcatggccgtccaaccggagctaaatacggaggagtaccctccccagaaattggcttaggaatatatactaacgtggaggaatacccgtactaagttgtcaccatcagcggcccacctctactgtcctgcagcatatatgcccaattaatgatatctaataatctaagcaccatgcttacattatcaaatattactctatatcctctagaataacatagatcaatcatttccatgaacattaaacccacaccactgcacctctctggtaggctagtcatacaactatgtcggcacaaatataaagtaaatccagtactcagacagagtaaagtaccgaaggtatataaagaagaatattctattaattccgagagtcttacgaaagaagaaagaaaagctactagagccatactgaaatcttctgaatactcgaggacttcgagaactatcctattctactccacttagcactagagcattaactaaacttgagagagagagagagagagagagagagagagagatatcaaagcttcttgcttgagtgtgtgttggaatgaagaaagtgacccctttatatagcctcccaatgatggttatggcagttggaattgtcagaaatgccctgcaaccgtcattaggagtgcatctggagcgtccatgtggagggctgagctgagccggtgctaccagggttcgaccgaacctgggccggcccagcaggcctctagatttggtcagggggttgacagatgggtcctcatggcagttgtggcagttatgacggtttccaggacggttacacctgacatgtgggcccttgtattcttaagcttgcttaggagtgaagttttcattaatttcttctttattcatgtgctaatctctgcaaacaaataatactccaagtacaagtggaaatatattattctaaaataaatatgtattgcaagcatagctagttctcctttattttagttatattgacggtcaaaattggtctgtaacgaccgtcaacatctactccagaaacaagagtgtacggcgtggatttggtagctggacatgccaaagtccaagttgacatggtcaaagacaattgctgaattggcaactaccaatcccaccaaaggacgagatacttacactcgctcatgcacgtggaatgtttatccaatggccaaaagacctcatcaccacaaagattattccaaggtcaaatgttgcagcaggcccaactcatctagctcggtcagctaaagctcatgcacctcagatggccattgaagctccttttgggtcccacgtcttggattttggtggaatggccatagatcgtcctccttcaaagaaaagaaaaggccaattcatctccaccgatggtgtctagcaggccaaatcatggaaggggaaaattgaaaggaaaaggaaaggtaggagggtcgtccttacctcccaaacggctagatctagataaggaggtgtacgttgctctcaagatcctagatcacgacacattctggccagggatgccgttggatcaagacaatgaattagccagaatgggcactattactcgagagctgcgtcggtactacgtggataaattgaactccaagaggaagaatagtgatatgtccatactgggtcatcatgaccaagcgcccttcctggggccacccagttatatcatagtgggcttctctgatcttttcaacctctttaggctacgagcggtggacaccgatctcccaaagtgctactcattgtaagtactaataacactaaacttagctaataacaatccatgtagaatgcttctagccatacagatcaaccttgaaggttatgttggatggaagcacggaagaccagaagtcaagttagattcctagatccacgtcaagtcaatgagacacaacttaagtcttgattggatgatgtggtcggttacatcatgaacaacttgagggcccactaggacaaaggcttcatcatattagcacacaatcaatagtgagtatgctaaataattaataatcccttctttctataaagctaatgcccactaaacacctaaagctcaacatgcaagcatagtatttattagcactcctaaaacctacatgtaagcatgccagatcaacccattaagcacacaaagctcaacatgcaagcgtatacttcctccgttttacattataagactttctagcattgcccacattcatatatatgttaatgaatctagacatatatatgtgcctagattcattaacatctatatgaatgtggacaatgctaaaaagtcttagaggctgtttggttggtgccctaagtatcatgcctgaggaatttgtgtgcctgaaaggcataggagaagttgatgaaacttgcctggccaggcagcctgacattttgcttgtttggttgtggacagttgtctgagaggaaaaagaatctacagtttagatgggtattgctaagtgctaactgtaacaaatcaatttattgcctaataatttttgccggcttcacgtacgtaaagaagaggaaaaaaaagaaaaaacataaatgcccaaacctacaacgatttcttcaagactccaactgcgtgtaaagtgcttcaattgtttcggcagatcagcgacagttgctgctgcgtgtgggagatcagatgggtcgcagatggaaccgacgaattgagatacttcaccgcagatttgtgtgacgccggatctggcaagctagtggtggcttcccacggcggaggcaaggttactgcatgcgcgcgacggcggcggcggtggaagaggcaagcttttcactgcatgcgcgtaatggcggtggcggaggaagaggcaagcttttcatgtgcatgcgacaacgatggcgggtgaggacatcgggcccagcggcggcggagtcttgcgtgacggtagcgatggcttgcccggaggacggaggaaaattatacgacggtaatctcgctagctgctgtgcctggagctcacgcgaccgaaataagtcgcctgactcaggctaatcacgcgcggagatatgcattaggccaggcgaggggaaaacagtctcaggccagcaaccaaataggaccaaaaccgtgtcaggctagttctcctcaggatagcaaccaaacagccccttataacctgaaacggaggcagtaataattatttatatatataatttatttcattctaaaactagacatacacatgctaaatcatcattctcaaatcattttcgtaatatttcaatccaaatcatttcatcgtttctccaatatctaacatatatcccacaacaaagcgcggggcatcatctagttacatctaaaagtgtggtttttaacttacactatattaactttgcgggttccattggattctattgtgcatagtgccaaaatggagtaggttttactatcttaactgccgcataagcgacaaatatgactttaacgctctcaaagaggcattgaacacagcatgggactaatacgtgcaaaaatgggcatgcatcaagaaggaaaaatccaacctctatcaccatgacgacttcaaatgcaagcaacaatccagcgagacctgtggtttccacgtgtgccataccatgaaggtcctcacaggacaggtgactgcgctagatcccgaggtttgtggtatattgatttgggaaaacaaattagtacgttggtatggttgcacctaggatctgtactaacttaacgcctctctttcaggaggttgttgttggcggctgttaaatgccgactctataccgccaacatctgcataaagtttggataataaaacatccaacatagtgataggtgtttcatctcaaatattacacaagtgttggtatatatttgtatgcagataataaaccccagtgttgggaggaaaatcagactcgagtgaggagaattatgtatccatacaaggagggattgtgaacttcatcgaaacattagtaaatcaacccaaaactccgagaaatggatagaggacgtctcagggagtccaccgaccgaaggccaggccaagagggcccagcccaggttcggccgaacccccctgatcaccgttgatcctggggtttggcgtggacgctccagatgttctcccaatgacggttgcagggcagttcggacattttcccttctcacaaccgtcataactgccctataaaaggacctcacttcattcactctcacacacacttccaagcttgagctgaattacaagatgctctattgtcctatattgtatactagaataggaaaagtgtagagtagaaggagtcggaagaattccggagttgtcggtaatcttctcctatttttttttctatttattactctgaattcaatataatattcttcttgagtaatttagatttatcttgtgagaattatctcttggttagttcgtaaatagcatacgggattattgttcactataattaattaaaatatagtgattgctttggtgagttataaacactaaagtagatattaattgcttagacgtggtgtttaggtaattgttatccagtaattgttgcgtatcccacagtgtgttgaggtaggtgtagaggtggtgacagccctcgagattagttaagtcctccctgtccgggtacgtagtagagcgacatctgggaacagcgggttgcctgtgcctgaagtattgcgttaggattaaagttaagctttccctagacactgtttctcactagtaaatcctctctatcctggcctatcatttggttggtgtccttggatgaaccggaggaagatttgaccacacacgttcttggattcgatacccttgaaatactccgtaggggaagtgctacatcggtatatccgtacgcttgcggattttatctgtgaccgtattaaataccaacagttgttacaaacattctagagcataatttcgaggatattagaaatgaattggctgccttcatcctagcaaaaattgtctctccaaagggcagtttttgtgcaaagtagtagctgaattatcataggatagctacacgtatatgtgttaaatggatgattaagtgacattctctattggaaaacgatttttcttggcttctgtttatatgtatgtacattggtaatattcatattaactaatatattcatcacttggttaatttaaattataactgcattcacatgttgtgattgatggttctcatttgaagatgcttcggtgattttgtaaggtaagaaatcaaaggtattggtcgttgagagaattgaaaaaattgaggtaatccaactattgagacttgcatgcatctgaggttttgaatttatgtgttgtggtcgtttctgaatcttatttttgtatgtgaatgtcaaatatatgggactatgggggaagttatgtgttgcaggaatactgcgaattttatagcgggcgtggctagcatttgaggctagccaataaaaccgatttgtttttttaatgaaaagcctcatcggtgtcgggtcgcaacaaacacctgtaactgatgacatacatctttgtcggttctaaactccaccccgtcaccgatgatcatgcataatgggcactgaaacaccctgtcagaggtgaacctgtgatttttaagtttatttgaaattagtaaaatccaattttgtaatttattttatatttttcagatatttaactaatcatgtattgtgttccagatggacttatatttcaatattatttatttttaattgtaatttcagttatttctatattatatattcctacttaaattcacattaaaatataattttgcaattatttttattttaaattttaattaatatcgtgttgtcttcttggtagacacttctttcagttttcgttattccaaatttaagttatttctaaattatatttctagctaaaagcatacttttccctttgattaatgtaggaattactagactttataatgaacgtggtggttttttttgagatgtttttattttcaaactagtaaaacaattacttaggttttggatcgttttgataagttctcataatttttgtatgctcagtaatttttatttcttcgtagtactttcaatttgtttacttttctgattttccctaattttatcactattttccaatattaaagtttttttctctgattttcagcttcttttttcattcttatctaattaaagattttcatttcaaacttttatttcagatttggactttttttctgcaactactaccggttacctcatggccttaggcttacaacctctgactttatgctctttcagatttatatgttgaagtattgattagcttatactggtaaggagtggatggtcatccttatatatgtgtgaacgagaatccatatatttgctccatctataattggtattctaacgcagatcaggcaaataatagttggatgagaatcctcgacaataatattactgtcattacagtcactggtatatgagtctcacccttctatcatccacatgttatgacaatcactagtatatgagtctcactcttctatcatccacatgttatgacagtcactggtatataagtctcactcttctaccatccacacgttatgacaaggacatgttcacatcccgaaacttgcccaaaatggctaaattgaaaatccaagaaggtgcgccgcctttgctctaatcaccacttgcccccgcagccatcgccaagcgccgcccgatacgcatccgacggccgaaaagaaacctcaaaaaagaaagaaacgcgcacgcgaggggaaatcgccaaccgctgcctcgatccgttcgaaaccaccccctcccgctcgcgagatatatatatatatatatattccccaactcattccctaacttaccacactctctcgatctctctctcactcgatctctctccttgctccccaccgcgccgcctttgcgatttatttccatcaccatcaccatctccatggccggcgagcaccgtttctacgactccaatggagatgtgagccgctacatgctcgacgacatggagtttcttcccttgttcggtgaggcagaagcggctaccacattgcccctgcccgtcctccccgacgtcgagccgcttcctacggcgccggcgccggcggcgacggctcacgtcgagcccgctccggcggcggatttcggtctcgggaacccggtgcttgcagatctcggcttcgatgtcgatctcgacttctttcccgagttgaattttcagtctccgccgccgccgccggcgatgaatgccggtggatacactcatcaggttcaggcgtcgccgccggtgatgcatcaccagcaacagcaacagcaaccgctggctccgttgccggcggcgcacggcttcgccggccagccggcgccggcgacgacgatggcgccctcaggcggtgacgacggtttgttcttggccgccccatcacgggacgctccatgctcccccgtgatgttcaatttcatggacttcaacgtcgacatgggcgacgtcgacatggatgatgtcctgatgtgggctgaccaagacacacacggcgccgccgccggcggcgacactgctccgcccgtcgtcgtcgatgagtacgccgacttcgtcccatttcaggccggagatctggactgctccaactgccaccttgtcagggagatgatgcatgcaaacggtaaataagttctatcaatatttcatatgctttcatgtgtttaattatgtgcagattaatacgcatcaaaatgagaattacttggcaatgtcgactgtgattattgctttgataatgaattatgaatagatgtccggcgtgtgattttgtgaaattgttgccctttgtgccgcgcagctagccggacaatatacttcttggttcatgcaaccggggttggatcatttcaacatgcgattgtggatcgcagatacactgctactggtgctgaaggactacacttccccgggagacaactgctatacttcgagtaagggatcgactcaaattaaattaactttgttttgttgtatccaatgttttttccccaacaccggctgttcataaaattcccaacaatcacacgctgttaccgagaaaacagattataatcccttgaggagatgtacgtctctcctcgtgtaccttttttttttcaaattcaatacaaatagtgtaaaaaaaattgacaatagtgagtataatgacgtctatcactccaaaaatcacgttcatgtttgtcctgcacagtaaataaaagataaattcatcatatgaatagtactttttttatatattttttagttaatagaagtggtttatatctcccggtctctaccaactcggatacaacaaataaattttagtattgagaaagaaaaagaaaaaaatatagagtgatgggacaagtccccaactcctctaaaacgataaccatttgaattaaaagctaagacaaatcacacaaattccagtaagtaattctataggtacaaagacatataaaacagaacaaaataccatttggctactaattccaactgcagtatatataactacgcatagtttcctacttctaataccaagtgtagagctggttcacataaagataacctactctataggattagcgaaattttattacaaaaagatttaccatttgggcaacgccaaattgaacaacatagtgcattggctcagatcataattttttttttggacttgggtatcttgacaagccaattttcaaatatattttgagcactatgaggagtgggaatattggatgcaaagaaaacactttgtcaaacaaatcgtgctatgtgactttcaaaaagaagacgttgaattgtctcttgtgcatgaaaaacaacattgcttatcccccctcccccaattatttttaaaaatgttatattgttaggattaccttcttgtgaaaccatataaatactttgattgtttttcaccttcacctccattcgttgttgcattgtttttttttatatcttagtgtgagtggagtttgcatgatgttgtgtacttgtatatatatatgttgtatgaatattgtcgaaatttttgagactttttctcatatctttttggatggatttaaacaagcgaggagacaacctctcaagggatcagaacagtttctatatcgtaattttctttttcaaatgttttcagccttaccaatcataccattgagtccgcgagcgacttcatcgcaagcaacgttgagaagctgaaaaatgatacgactgggcatcattttctggacactggctacaacttctccggagcggtccgcaccgacatggccaacagtcacacggcgatggaaatgaacatgctccatacgatcgtgtcagccccatttgagaacggtaaatgatcgagccgtcgtcaaattttcgatactgaaacagtggagcgagtgataaggcatggatgttttcatttgaaccattttaatttgtacattgtgtattaattcatacaaattgatattatgtgcgcagtaactacagatgcagcgtccccgccggcggcacagttcatcggagctcctccagcagcagagcttccagcgccggtgccggcgccggcgccgccagcagcccatgagcagaatgctgttgttgctaccttactgttcaaagttgaagaattctatgccgctgcaaacagtcgtccagcagcgaaaagggcagacgtgaagatactggaatcatctcaagtgacccagcaagctggaggtagctctgctgctactgctaccatgtacccgagcatggtagacaggaagaggaagagggcgcaggcgacgccatcaagaatggctccacacgaggtgatacagtatctgcgcgccacagcggtggaaactgacaaggaactggagactctgaacaatttcttcaaggtttgtgatggggaagacaaagctctaataaccttctcggtggagcaggtatgcatgtgcatggaaaacgatcatctacatgcctctagttgttgagtattacctccgtcccaaaataagtgcagctatagatatccgtgcttagcgctttgaccatccgtcttatttgaaaaatttatgaaaagtattaaaaaaattagtcacacataaaatactattcatgttttatcatctaataataataaaaatactaatcataatctttttcaaaataagacgaacggtcaaacgttgaacatgaacagtgctaaaattgcacttattttgggacggagggagtagtaatatatgttgtacatagttcattgcatataaaatgaagttgatttcattttatgtgatattaatttggttctttaacctgtcacagataagaagtataaagaagaagatagggaggatcatcaacaaaccggtcactgcaatgtcaagtaggcggatggcgagatttattgatgaaattgatactatcaaagaagagaaggcaagagtgtttgaagaaattataaaaatcttgaaaaatcctaggaggaagagagagaatgatggatcttctggcagcaataggaaaaacgttggtggatcttctggcggcaaaaagaaaaccgttggtggatcttctggcagcaaaaagaaaaacgttggtaggccctctgcgaaaaaagctcaaaaatagttcttggggacatcgtgattatctggagtgaaattttctgctgaatgtagcgttgtcattatgaatcttcatatgttgttattgcgttgtaacaatttgtaattcaatccgaactggatgtagtacttatatgacatatcatttttatatatagcaaatttattgtccttcagtgtggaatgatttatattagtttgcatctctaaatcaatatgaattctactgtacttgccctgtgtattttaccaccttcacactggaaaatactactgcacaaattaacccatagtttggtacttccaccatttttaaatataagaagcagttggcttttggacacattgtcttatcattcatcttttatttgtcttattacaaaatatagtacacatataagttataacaaaataaatgatatttgcactatcttttaataagttgtaaggccagacgtacgtacaaaagccggtcatatactctaaacataggtagtacttgttttacgattaaactgtgtattaaactaacaggaattacttgttttacgattaaactgcattaaaataacaggaatacgcataaaagtgaaaacaaatatttaaaacacacactcaattaaatcaaaacatggtctcttcaaacaggactataaaggatacagaatgtgttaattaaagaggtgagatataaaagtcacgagaaaacatcagtgggtaaccacggactgagccaaattttcatcacaaagaggtgagatatatatgtaataaacatgtaaatacatatatactttgacgattaattcctttggatatatatttataatatatattacatttcttgtaaataagaatatagcttagttattggaaaattgacactgcagtatcaatttgttgtaattaataatattagtgtaaaactatgttcaattcttatacgtgcgtaccatatatgcattactgatgggtgttaaagccccatcgcacagatttatggttttcaacttacaagggtatatttatttttgtatgaaatctatctatctattatatatttcctaaaacgctcttcctacaaactctcgtaagctgcctcgtggtgctctaataaagtagagtaaaatccaaacaattctaaagaaataaaaatatctaaccatcgattttactttaaatacggtgaaatcactattttctaccgttgggtgcacctctatacctaattaaaaaaatatgtaaggccttcggacaaatttttgtccatccacctccccatcacgcatggcctccgtttccgcctctctccctgtctcgatcccgtatgtctttgcttccgcctccctctctccctcccacgtgcctccgctttcgcctccctccctccctccctctcaacgcctcccatctttgcctcgtgatccccctctccccgtagcccctctcctccctggcacctctcctcccagcacccctcttctcctctgtgttccctccctcttgcgcgctcaagtaaaacggaaccccctcgtccaggaacacgttttgacatgctcactcgaccgtgttcaccactagagctcgttgttgccgtttctctttctgtggggaccacatcgtcgctggttgtgttcccgctgttttgattttctttataaccaaccgccaccatctatggacaagtcacatcgtggtacatgtccgaccaccttcctcaccgccatatgatcaccagagcaccaacgcccatattccctcttttttgtttcttgcttcggctagggaagatgatgaatagtgttggttgtttttattcatcttcgttctttctacgcattcaaggaaaatggaacccctcgtctgggaacatgttttaacacactcatctgctcgtgttcaccaccagagctcgccaatgccatttctctctctatcagggccacgtcgttgccggccatgttcctgttgttctggttttcttcgttgcccgagcaccgatgcccatctttattatgatgagaatatgagtatatcaatatgcaatactggttttcatccatcctaattatcatttaaatttgtgatcaatacttagcataataaaaaatttatttgtcttttacccgtaacaaagcacgggtattttgctagttaataaaaagagttaaaaaaaaaggatccacacgggccgtccgtgtcgtgcacgtgcaccagcacacgtacgtacgccatacctcctccctcattctatattagatagaaaacatattttgtgataataaattccgaacaattatatgctctaaatcatatagctaatattttatccacatacattattagattatccaaactaactatatatttaataagtaaaagagataaaaacacatttataggtaaaatcatatagatattttaatgatctatttaaaaacacaaagcttttaatagaacaatatgcaacacataaaattaatgttataaatacacataaaatttataaataatattatgataatacacaatttgattagaaaatagatatttaacaagtataaaacaaatacattactttgggtcattattatatttataaatcaaactgttgaaaccattggatctatctcaaaggaaacataactccccccccctcttgtcgtatgacatgtgtacgtttctcggaagcaagatctaggatatgtatatctactctctctttattgattcatatgtaaatatatataacaaattgcatcaatgtgaaccaattaaaaagagggctagcttgatggtacattattagcaataatagttttccaagatttgttcaaaaaagagccccaaaacattcaattaaaaaagaaaaaacaccttagttttaatttaaacttaatttgttagacatgtttcctaaacaaactattctacctcctttttaaatgatgaagaaaaaaatagcttatatagatgaattaaatattagatagtatatgggtgaaaaatactcctatgtaagaaaagttatttaagaaaagatgacaaataaatttatgaagaaaacatacttctaaagtttggcaagtgctatatggttggggaatatatactatgtacacaagcttcctgtgcacactccgtacacatcaactagcaaatgtcacaaattttttttaaaaaaattggacacatacttccaatagtattacacctacctgtgaaatcttatctttaaattcattatattttagtcataaagaaaaagacaaaattctaacagatttttacccttaaatctgtcaatttttttcacttttttgttatcgctaaaatataatgaatttgaatatgagactttatagatacatgtaatactattaggagtaaatgtctatagttggtgtgcactgattgtgcacgggaagcttttgttcatataggatatggtcccatatggttgatattcaattgttagaagtttctcaaatgcagactataatatacatgccctgcgtgggctatcatccttgttaatataggttatgtgttcccagaaaggccaccttgaactcttatacatacatgccgtaggaaagaaatataaaagagtgaatttaattcactgagtgaatcatctatataactattctcagatacagacaaagtagggcacatgcaatggaaagaccaaaagaagccagtaaatttcactgagtgaatcatcatcaacatatataaatactcttgcatacatacaaaataggacacgtgcaatgaaacatatgcaacgacgaaaacgaaagaaaacggcgaaggagaaaaagacaagcacacactttctacgcgatgacaagattggcaatccccacgagagcagcagtccacaccacaccggccgcgcctgcaacggccaccgcattggtggtggcgctgtcatctgaatcttctcctccagctccggccgtcggcgcggtggccgcgacctcattcttgggcatggcgccgcccttcttgtgctccttattggcgcccttcccggcggcggacgcgggcgcggcggccggcgcgggagccttggccttcccgaacatctgctccggcaggagcacgccgtcgacggagtagacggcgagcgggaagtcggcggagagcgtggtgccgagggggacggcggcgacgccggtggacacgttgacgaggctctgccccgtggtggtggtgacgttgacggtgtacacgccggcggggcccgtggcctgcgtgcgcagcgggttgctggccgtctggaacgtggcgagggtgtagtagcgcgggaggacgtggtagagcaccagctgcacctgctcctggtcgctcaggccgttgagcgtgcccggcctcagcgcggcgaaggcggcgtccgtcggcgcgaagaaggtgaggccgtcgtaggtggtcttcagctggctgcccagctgctcgccgacgcgggtggcgttgaggaggcggagcagcgtgttgtactgcccgcccttctcgaggatgcccgtgaggttgatcgtctgcgccgcaggtggcgccggcgcaggggcgacgtccgcggcggcgacggccgcggcggcgaggagagggaggaggaggatgagggtggtgtgagaggccattggcactgtcactgcgctattggatggtgagggtgtaggaggtgtagtgggctagctagggtggagtgtgaggtaggagaggtttgcatatgcacatattgcatgtgagtgggaatttttgttttgtacgtgttgttgtggcgaggaacgtgaaggtggggatggagagagaagtgtgagatgcatagtgacatgacattgtgagctggtggatgggtgtgggtgctttggagtgaagcgggttaatgttgggcagagagaggttaaaaaaaagctgtaagcttattacttagagccaacttaggctgcgttagttagttaggttcccaacgcatatccctcatttttaacacgcacacttttcaaattgctaaacagtgtgtttttttataaaaaatttctatacgaaagttaattaaaaaaatcatattgatctatttttttaaaaaaacaattagctaattcttaattaatcacgtattaatggactgctccgttttccgtgcgcaaggcattagttcccaacaaggagcaacatgaacacacagccttaaaataggatgtgacctatatatcttatgacaatgaggacaaatatttttttggacggatggagtcctctgtcttataatatataatatatgatccaaaattcaaactttatctcaaaatataagaaatcctatagtatatttattccattaattaattagtatttaatattttttaccatcttaccgtcgatcacccatctaccactactcacaccctatttaatgagagcatcatggtctttttcttctttcgtaatctctccaaaagaacctcgagtgatgttggatagtagagcttgaatgagtctaagctggtgatggtggggtgtaacttttggttggtttttcacacagtttcattatatataatcatggaccaaccactatagttaataaaaaatccttaatttttcatgtacaatctatgttactacttcgtatttcactactgttctgcacttctatacaaaattcttaattcatgcaattagcacaggtaggagtacttcacaattgttggctgttagctcatttgccaaccgttagttcagacagccctcacctgtgtcctcacctaggctacctacctagagcagagtaccctatgcaaaattgggaaatatataagcctatttctcgatgggaataaattgttcaatcgaaaggagatgagtctggtgccacgcgttctcctccgtctccccttctgctagtgctttctaccaggggtgaaaatagtcggaatcggcaggatctcttcaaaaacgacgatggatcggccgataattgaccatatttatcatttaagctactcagtgtcgacattaatacgacgcataaagaaattaaaaaaacaaaatttataaatagctataaacagtacggtaggaaatggtaccccttatacagaaacgatgctcggttgcatcgagagtttccgtgaccgttttcagtaccatctggctggcaccctagccttcgcctcatccagcaacacctccacatcgcaggcgcccgccacctgtgccacaaccgtgctaggccctcctcctgcgcctcggccatgcaagacactgccatcaccacatcatggtgaccgaggcctcctctcagcctcggccttggcctccatgccctcctccttgtcaccgttctcgtagtagtcatcatcattagagtcctattatgacagtgggtccttgtggttgtcccaccagtgggtccttgtggttgtccttctttggtggggacccattgtatcagcggttttgaagtcactgtgtccactttatcagtaggtgatttgcttacaatgatttgggagttcagtgatgcggggtggatgcgctcgatgtatcggctctattcaatccagtgcatcgagcctttttttggatcgcgtacgtctcaaaggtgccgattttaaaacctacaaaccggcatctattacacacatatagatacagggttttgaaaccggcaccgatgaccgaagtcatccgtgccgcctccatggtgccggttgggaaaaccggcacccaaggggattcccaactggtaccgatgtgcttttctggagttgtggtgatgtaaaaaatcaacaaacgtcatatataaaaatggagagtgtatataaaaaacgaatgtactaactgcgtactaagacatacttccttcgttttacgatgtaagactttttagcattactcaaattcatatagatgttaatgaaactagacatatataaaaaaacatatacattgatcaatagataaatctatgttagtccaaaaggtatatatatatgaaacggagggagttacatattgtagccacgtaaccacacacacacacacacacacacacacacatatatatatatatatatatatatatatatatacatatatatacatatacatatatacacattcacacacacacacagatatatatatatatatatatatatatatatatatatatatatatatatatatatatatatatatatatgtatgtatgtatgtatgtatgtatgtatgtatgtatgtatgtgtgtgtgcgcgcgcgccgtcatgacatgcaagatactccgatatgcatgatatcgatcccctgttcgatgggtcggattgctgcatcgttcgtccggtttgtcatcaggtcgatcgagacggtcccctcgatcgtcggattcgacgtcacattcatacacggccggccggctagctggtgtggcagctggcccgtacgtacgtggcggcgtccagacaatgtgcaggtgatgaacgtacccctgctacatgtgaaatataacatccccacaccgagcagccggccaatcttacataagtttaattatattttctcttaggttattattatttcatcaggtttatgcaccgttttctgtggcgaaattacactttattttgcttataaaaaatgtttaggatgctccatggaagaggtgaccatttttttttaaaaaaaggatttcaaaagccgacaatatgaaaagttcaaaaataaaagcttacgtgtcctatagtaacatctcactaatttaaatttgtcttcatcttacgcataacattttatgtagtgaaaggcactgtgcattttttaaaataatctaaatcattgctaaaagattttaaaatatttatattttgaaacaaagatatttggacaaggaggatccacattactaccaccagggtcagatgacccgagtcatccgaccatataacaacatatcctcaacattttgtaggcagggacccggccaccaagctagctaattgaccccagtccgcttaaacgcacagcagctcatggggtaaaattttaaaacaactaggtgaaaccccacgcattgctgcgggaatttagtatgataacaataaaaaaaataacgtgtaagatagctagataatatcagcttaagtaaactaatgtggtttatgataatttaaatttaaatagtatgtagaatggtgatttaaacataaaaagtaaggtggtatgactttatggaagaagaaaagtagggagatagtttggaccgtagattaatcatctaaaggctaaaaacaatagatgtgatatgacttaattagagaaaaaaggagaaagataatttagaccatagattaatcatttaagcactaagtgaggataaactatataagtatataggatatcataaaacttaataaagatatacattgaaacattatgtgaattatgttggatgataatttaacatgtttgtatttgaaaagctcttaaattataaaaactataaagatatagtatgtttgcatgatgtttaattgtttaaatatgatgattgttagtggatgatgatgtggcatcttgttaattagtggatgatgatgtggcatcttgttagtggatgatgatgtggcatctttgcatgttaagcttaaggagttagtgagggataactttatagtaagataggatacaactctttcctttaaaaacatgtactcccttcgtcccaaaaaaagtgaatctatgattggatgtgacatattctagtacaacgaatctagacagatgtactccctccgtcccataaaaaaccaacctagtactagatgtgacatatcctagtactacgaatctagacatatctatatccatattcattgtactagaatatatcatatctagttctagattcatttttttgagatggagggactatgtccagatttattgtattaggacgtgtcacatccagtactagtttggttttttatgggacagagagagtatatttcaataagtgacagtacgtaggtactcagcgtactccctccattaaaaaaaccaacatcgtactatacatcctaccattaaaaaaactaacatcgtactatacatcctagtacaataaatctgaacatagagtatgttcagattagagtatgttcagattcgtggtgctaggatatgagtacaaggttgtttttttttataagctgactgtttgtgataagactgtgccacacaataccatacgtatctctcaacaaatcctatgcacagaaatttcggtgaacaaaaccaaagttttggataatggttagtaaattatatatctacgttacattcaagtgaaaaataaatttgttcgtttacatctaattttcaaccatgagattaaccatgtactccctccgtcccataatataagggattttgagtttttgtttgtaacgtttgaccactcgtcttattcaaaattttttgaaattattatttttttttgacttactttattatctacggtattttaagcacaaattttcgttttttatatttgcaaaaaaaaatttgaataagacgagtggtcaaacgttgcaataaaaactcaaaatcccttgtatcgtgggacggagggagtatataaattaacaagtcaatcatggagcgcttttgcatgcatgcagcgcgcatgtggaggagagcatatatatatgcttctacgtgcaaatgctaaagaacccatcacaattttttgggtgaaagaactttgaaatctatctagtatatggtgttattacactatagctgtactgtaatgacattttaatctctatataacttacaatgtactccgtacaggatatatagaattaatgtatctttgtttccaatacttatgtaaaatctatatataaattataatacaaaatactcatagaaattatatatgttagttttagtactgtataaaagttaaattttgaaagtgttttaaaataagagataaataactagcctaatattgtccaaataatctacctcaattataggtaaaaggaagaatctatataagaaggtttctaaggtaaaaggtacaaataatctatctcaattatatttctaatgtatgcagactcatccaaaactgctttcgatgagtgacatttcacagctaagaatactgcgaaaaatataatttttggcggaaaagagagacatatgtacacatgtatctccagtttatctaaacaaaggaagtcgtgaagaaaaaaggaagtactactccgctgatgttagccagctcgtgaaatcacagtgttgagaagataagcattaagcattgacgagcctcctagctctctatagaaggagtcagtctagctgaagagaacacaccagagaagcaagagtagtagtttctcctgcctctctaggcagttttacccaaaaagaacacttctctatagatacaaggaccaccggatgcctatacaagatgcaagctaagaataagaactaccaaagaggtttctcaacaaacaaacaatgatatataagaaagttacttcatattaaacaagtaagcttacatacggttttctctttcgggaccccaaagaaaggtacagacaagttttctcaccttagaccgtttatataacatttgttgctcccaatatactagaaaggtaaattattaacattactacaggactaagaggctgaaggttcttaaagactaagctagaggatcttgcttctctggtctgtgctctttagctggaccaactccgtttatagaggctagagaaggaggctttgtcggtgcttcgtgcttatcttctcaacactgtaatttcacgagctggctaacatcacagagtagcacttccttttttttttcttcacggcttccttcatttagctaaagtggagacaactttgtacatatgtctcactttttcggccgaaagttatattcttcacaatattcttagcagtgaaatgtcactcaccgaaagaattttgtgatgaatctgcaaacgttatcactctttgcttgtagtgttcttctgaactattcttccctttacccttgaaatatagttgaggtagtttacttgtagactattaggcttgccacccctgaatgattgataaatccttatcaattgaacctttcttatatattgaactttgaaatctatctactacctatatagtgttagggggcaattgcgtttttgatcctattttaaggtctaactatcaatttaaccctattttcctaagtttgctcttttgactctcttttttaaaaacgaacgttcggtctggccctattccgttaaggcaacgtaacagtgttaattcagaaaaaaatagcctttatgcccccactcattttcatttgactctactttttcaaagtgcttgcctaattttgtgtatttttatctaaaaatgtgacaatttttttactaacataagtgacaaatttaacttaggtttgagtgatttgacaattttgaaatagatctaacttcttttggacgaaattcacttagatttgatatatttttgagaaacttaacatacatttgacagatttttgataaatttcacaaaaaaaaattacataatccctccagcaccagcagcatgccgtcctcctgaccaggagagcaccgggcaagaacaaagagaggcgagagagagatggagagcagcagcaacagcaaaaacaaagcagcaaaattctagcggccagcgacggcgagctcccgcgccgcgcgcctccctacgcgccctcccgcgccgcgcgcctccttccgcggccggcggcggcgagctcccgggccgctcgcctcccttcgcgccccgcgccgtgcgcttcctcccgcgcgtgcgtctccttccgtgcttggcggcggcggcgggctcccgcgccacgcgcctccttcgcttcgcacaccgcggcggcgaggtcccgcgactccctccttccgcgcggagcacgccgagagagatggggttgagagtgactggataggattgggagtgagatgatagtgttgagttcaggggtattttggtcagtttgaataataatttgatcttttttttttctaaatgaaaccctaacggtgtaactttttaaaaagcagaatcaaataagcaaactacgaaaagtagggttagattggtagttagactctaaaatagggtcaaatgagcaattgtcccatagtgttattacactatatagctgtactgtaataacattttaatctctataaaacttactgtataatccgtacaagatatatagatttttcgtttgtttctagtacttatgtaaaatttatatataaattataatacaatatagttatataaattacgttaattttagtgtggcgtaatatagttaatttttgatagttttttaaaagaaaccgtcgcaagatttttcttgatagtcctacttgtgtggcgatagctcacatgtggaagtatgatcgggtctggccccattaacagatttgtggagccatcgtttctcttattcatggaataagcgaaacgacgtatttataaacgaaaagtaatttgtgaataaaacttttatatacgtgttcttagcgatctaaaagcaaaggctgaaaaataaacttcgatgaaaaaaccttaaaataagtttcaaatttaaggttgaaaattttaattttggctgataagtataagcataagcgaaaaaatgaggtccttgagctgtctttcatttttatttttttcctggaaaaagtttgtttttcatccctcaatcatatgacaagtttaattaattcacatctcttaaccgtagaaccaggtataaagactcgcttaacgattgaaaaccggataaatttacctccctacggtggcttccctctcacctcggctggccgtggctcctaccctccttcccggggttggaaatttcggatgaaattacttcaattttttcatgaattttggtaatacttgttcaaattcaactaaattttatttaacatttcggaaattttgaatcgaattttttaaaatttcagtatttcggtgaggcccgatcagatcggcataaccaataggatcaaccctgctccttctgcggctcgctcaactggcaggggcaacgacactggcgcggaggtcagcgacagcgagaatgaagggatgcacgtacgtgtcaaggtgtgagccgaggccgcgcgctcggttcccgctgctgctcgctttcctacggagaggagccaccgacgccgaggcccttccttcccgccaatagccactgccgaggagaagcagtcgtcgtcgcgccgggatggggatcgaggtgggtgcggccgtcgtgctcactacttgctgtcgatgcccctgcgcactcaaccccacgaaggtgacagatgaacacgagcaggaggccgatggcagcggcctcggagacgctgacatagagcaagaggagccatcaccaccggcgcgcggagctactagctgctggcctcgagcgcgacgaggaagttgtacgggaatgccgtggaggacacgaggatcacgccgtcgagaacttcggccgccacagtgcgcctacgcgtcttaggtcgtcacgggtggcggcggcgggaaccttcaattcccgccagcagcgccgtgttggctgtcgctcattatcgtagcaaaagtcgctccgcgaggtcgagctcttcacggcaaagacagtgagcatgcacacgcttgcttgcttgcttggtgccaaccagtatgtcagtggggatcgaactggagatgggttgttgttgccttgttggtctgattgttgaacagctccatttggggtttttatttgtatcttcttcttttcgattgtaatgcaatgtaagcgtcacctacctgccatgttggacgaatacctggtcgatcaatctgccacgtaagtaccatattagataaaatcatctcgcaaaccatcgagggagatgaattgatccggtttctaaagttgagagaatttttatatcctgtattgtgatcgaggcacaacaattggactggacatataattaccatcgaggagatgaatcgatccggtttctaaagttgagagaatttttatatcctgtatcgtgatcgaggcacaacaattggactggacataattaagggacgcagaatcgacttaattcttttttttccctctgtcacagggctgactcagcatttcaagcccaaacacagttgctttgcccctaaaaagaagctatataataacacacctaataaactaagtgacgtatacgtaaccttgggtaatgtacactgttggagaaaggggctttactcccggttcgtaacccccctatagttccggttttcaaaccgggactaccaatccgggactaaagatcactatctttagtcccgggtaaaaaaaaccgggagtaaaaaatgtatctttagtcccggttagtgttaccaaccgggactaaagatagagctagcctagctagatcggttactttattattattttcttttcttcattgtgtttttaatatattgatttcactccatccccatcccaaaatcccaaataaattatccccaaatccccaaatcggccatattcaaatagatcacaaaatcttaaaacaaaatttcatcataacttctacaaaattcatcacaaatacatcacatatttacggacatcacacacaaatcaaatacacagattcgaatcacaaattcttaaaaaaaagaaaaataacacaggctgctggccactgccgcgccggccgccgcgaggccccccggtccgccgcagcgccgtccgccgccgcgaggccgcccaggcctccgcccgttggcgcgccgcccgccgccgcgaggccgccgcccgggcctctgccccgccacgccgcaaggccgccggccgcccgatctatcagtgggatgatgggtagggaaggagaggagttagaggagagaagttagagaggaggaagaggaagggatgatgggggagggaagttgaggagttagaggagaggaggaggaagaggaagagatgggatgaagagataaggttaggagaggaagaggtgaagagataaggctgcccatctcctcctcctcctcgatctcgcagatggcagatgcctcatactctccgccacgatcttttgttccggttggttttaccaaccgggactaaaaatagatctttagtcctggttggtaacaccaaccgggactaaagatagtatgcatcttttttcccggttggtgttaccaaccgggactagaaatagatctttagtcccggttggtacattaaaaagcagctctaaacttttgaatcgggactaaaaataatttttaatctcggtttttattacaaccaggactattgtagattttggccgaccgagtaaagatggtttctccataagtggtaaccagggtcaatagtctgaacttggccggggagaggacgttaagatgaatcaaacaatatcagtttcaatcaatttgtgaccagacaatggagcttatcatacaacagacgcagcacacgtacatgttgtgtggtttgcaggcctagttctagtgcacaactgctgaccaaaaaagttcatgaacaaccctctccggcaccggtaggcctccccacacacatgcacacgagcggctttattttattggagccgccgtttgcagggcggacatacgtatacttacgggtgcccagaaattcagtttagaaaattttgagctatagtttatctattttcatcatatatatattatgttagtttaaacttagacatctgtatcaagtaaagcaagcgagtggacagtaaaccatatcaacttgtctatgatggcctatctatgacagactgaagtagctatcacagatgacatcatgtctgacgggttaaactaaaacttattgtagataaggctcaaggggatgactcgtcacaggtaagaactcatctatgacagtatgacgggcctatatcagaacacagcacatgacatctctaatgggcttacatataggcccgtcacaggtgaccttcaacctgtggtgggtgttaagtttgcaacctatcaaagatgagatatctcatctcaaacgagttaacatcttatattcgtcagaaataacttaaaaccctcccacccctcatccccgcacctaccccaccccctgtgccccttctcctcccgtcctcatcttcatgtctcatcttcctctcatcactctctccttcacatctccagccgacgcctcccgaccgctggccaccggtgcctcccccgtctcctgaccaccggctgccggatctgctcggatctgcctacggggcacggatccgtccatcgcggcctctcccccaaaggttagccacctcctcctcagccaccccaccgtcggccgcaggatttggactcaacgagtttgggggacacggatctgatggcagccgccttcctactggccactggatctcgtggacttatgggacgcatatccggccaccgcggcctctccccccgaccactagccgccttctcctccgccacctgactgtcaggcgccagatcgggcctccgccacctccattccatagccggcgtccgcggcctcccctcctcccccgattcttcctctgccaccctaccggcagcagctggatcccccaaccgaccgccagcatcctccaccgtctcctttacccaagagcgctgccgccgtttctgactcttgtaggttatgcttgatttttcttatcttgcaaattttcattgccaaatttcagattgggttatattctcggttgcttgtatggatttgtagtttgttaagatggggattattactggtgtgatgtatattgtcactcaagttgtgtaatctgtgatgtacttgtgtggatgtgcttcatgtgtagctatatctctgatgttaacagatatgtcaataaagcgcaaagttacggtgtcttgcatcttgagatgttgcttcatgtcgtgagctatgggtggtgaattaaacctgtcagagatgtctatcacctcagatggcaggaaagagccacccatcacaagtgactctcatctgtgacgggttatttttatgtggcccgttagaggtgttaatcatcattgacaggcttccacccgttagagatgagatgcagtcatcactgccactgatcattgatgcgagagccgaacccgtcagaggtgatgatatgggcctgtcagtaatgtgcggacccagtgtagtgggaactcccctcgttttattatagctcccccgctgatgcttggatcgatccggcccgtcccaccccttggacgtacacagtgaggcgattttgctagatatttgtcatcaaatttctccccctaatatttatcagatgtaattacagtacaatcgtagtgtaattacactgtaacttacatgtaattacaatgtaactataatgtaacttatatgtaactttcaagaatctctcagtaacatgttatttcagtaaaatagaggtcctgggaataaattctttcacatatgtgtgtgctgtgatttttttattcctcaccagaacaaatcttgtaatagatctaactattcaaaattacgtgaaacttacatacaagttacactgtagttatatgtaagttacagtgtaattacatacaagttacagtgtaattacactatgattgtactataattacatctgtcaaatttttagtagaaaatttatcgacaaatgtataggtggtccccagtgaggtactgacgcacaaaacaagtactagtactatttgactcagatgacacacagtgtgtacgaattaaagttgagcgtatatgtaaattataaaactacatcggtgcagtaacttggaatgtaaaacatgcattcacaaggtatacatctgataaacaaaatgcaatgttgtttgtacacaacatattaacagagcgaaatggagcgtgcttgtgcgtagcatatatcgagcaaaaacccaatgtaaattaacgatatgtgcatcgcctgcatcgcatgcatgcctgctcatcaatacgagagcaggctcacggcgaccaccgcggtcacgacccctgcaaacgccgccgcccatcccgccggcgccatcctgccggcggccgccgtcgccgtggcgtccacctccttcgacggcgcttcgtcaggcgccgccgccaccgacgacgacgacgcggtctgcggcttcccgtgcttccccgccgccgcgggcgcgtcggcggcgccgtagtccttcttggcgccggggccgaacatgtcgggcgggaggaggacggcgtcgagcgagtacacggcgagcgggtggccgtcgcggagcggcctcccgagctcggcctccaccaccccggacgagacgcgcaccctgtcctcgccggcggtggtgacgttgacggtgcagacgccgcgctggccggaggcctgggtgcgcaccgggttggtggtggtctcgaacgtgacgaagccgtagtacctggggaggacgtggtacagcaccagctccgcctgcgcctgcgcgtccatctggttgagcgtccccggccggagccgcccgaacgcggcgtccgtcggcgccagcaccgtcagcccgtcgccgttccggtcgttgttcagcaggctgctcacctgcgacgtcacctccgtgtccttgagcagccggacgaaggtgttgtagtgcccggccttcgtcaggatctccgtcaggttgaggggccccgtcggtgccgggcttggcgcttcgccggcgccggagacgacgacgacggagacggtggctagggttagggacagtacaagaaatactgtgcttggggaggaagccattttggatgcttaattaatttgctttctgtatagctactactgtactgtgcggtgttagggctggggtttaagtagggagtgagagttggagaaggagggctttcaataatttcttgcagttaaataacggccaaactgttggttcgaccatcctttttctagttggagcgggagacgtctccagttttgttgtggttatgttggtggtgcatgcttatccatgaaacatatacggagaggggaccaatagtgaggtttgctttgccttttcatcttctgatcagaataagctaacgatcaataatactatactaatgatagggcgccatatattgcatgatggatttattgcgatatattgtatttttctatatgcctctatgtgctagtagctctttgatgttgtaacttccaagtgtcaagctgggctactatagctaccgtactatatcgtgtgatttatgaattagataggaacattcgtgcatgcatgtttatattctgcattttgtagtgggcatgatcaatgacagtaacggatgtttgcgccatattttctcgaaaggacagctgacctagacagtcacattaaccacattgtttgttaagactaacggcatatgtaccggtacatccgtactttttacttgctgttatatttggacatcgccacttcaatacacttaaggctgaaaaacagacagcgacagcagcagcagcaataataataataataatacaaaattatccgtctgaacttacgcacttgttcaatttagccctctaaattaattatagaaccacatttttaaccctcaatacttgtaaacaagagtaaagtaacgaggtgaacagtgggattttacgatgaacatgtttttttttttggctatttgagtcgatcagaccgcgcagtgtgcgctggtcagatcagggttgtgcggatggtcagatcaggtaactcaacggtctaacaggttagctcatgtatggagttagcttccagctgtttagttggatactcatgattacttcatgttatgacttctatatgattactatgcatatgtaatactattgtcagctaatattaggttaagttgagaaagcacttgtgcttggctagtttagattataaatcggataaatagtttagaagaaaaaaaacttttaaagtgcggaagatggaaatatgagaagttagctaactgagctgcacaaggctcttatccttttttaaagagcaattttactgtttttgaggaggtaccatgaggtatcactttttctattgtaaatttggtacctcttggtacctaggtactatgaggtaccatgaggtaccaaattttacactaaatttttggtacctcatgttacctcctcaagaaccgtagatttgctcttttttaaattgtcgcacaaagagactgagggggcagtggctatgcatgtaggtattcatgtatgagagagcatgcgtgtaatgtgtagtagtggacacccgatttttcctcttaagatcaggcgctcgagttgcattcgccaagttttgatttttggtctaccattcatcactcctctagtaggatttctccttgtgtttcgatcctaagcttctcgcgcgcttgccacccctccctccaatggcggtgccggcctctcccagccgcagcgatcggcaatggtttagttgctgccctgctgcccctctccacgacatactggtccccacagtacgtccctctccgcgcagctctgaaccaatccctctttcttggcaggaggacacagggaaggcaggggacgggatccggcggcagcaccatcttcttcggtgatggtggaggtgtcgtgcacacacttcaggtcatggatgagtcaactcgtcacaggaggactggtggatcgagtaaatcgaacttattgcaaaacatcaagcggtaattcggacttcttccaataaaaatccccaaaattaactctaaaattagttttgaaaattcaaaattgatatgtggctgataaccaaccagcagaccatgtgagagcctcacatcattgatttatgacctgttactccatccgtcccaataatatataaacattgctaaatagtctaaaggaagtgcatttatttggattcggcttctagctttaataggagaaattaagggtgaagaagaaaattatgataacacttattaaatgaagaggtgttcaggagtaggagtgtagtggtaaaatagggtgaaaatcaattggatcatgattaagatgaaaattaaattgcctgtactagtgaacattgaaatcccaaaattatattttgggacatagggagttatttttttatttaaaatcttcagttaaattactaagatactcaatagagagtccaaggtactgaagaaaatgaaatatcatataattattgtccttgacttttagaattattaaagcttaagaaaaactaaaattgagactacaggcggagtacaacttggtctagtccacgttagttacaacttactaactattaattaactttttttcttttttgagaaagagaggattcctccccgtgttattaacaaactcatcaagcgactactaactattaacttataaatttaatttaataactattaaatcaataaatattaccaaagcgtcactaggatgagtatacatattattaaatttgaaattttagatatttaaagaaataaaaaattagtttatgatagcactccaaaattaagagtatgcacaattaactttatatttattgtatatgtttaaaataattaagttatggtattacaaaaatcattagagtgaattttcaatacaactttgcaggtatttttgaagtagtaattaaattaaattgttttgttcttaagccttaaagttttcatgtatacaaaatatgcaatgcaaatacactactacataaatgtttttgctagacgagaccctggttaggttgcagacgaaccataactgcccgcgtttgtaaaattcggtcttcattttcgcatacggcatcttaagatgcccgcatgcaaaaatcgattttcgtaaatagacaacttaaggagctgcatgcgaaaataagaccatttttgcatgcggacctcttgagggaccgcatgcaaaaatatctcatttttcttttttcccatccacttcaatttttttacccatctcctgtcaagatatttcaatcctctcctccactcctcgcttcctctcctctcctcaatctctctctccctccaagtgggcggcgacaggcgggcggcggcgccaccgccatccccttcctcattgacgatgacaacgacgacgacgaggaggcgaccagctccatccacaccccccccctgacgctgccaccgctgacgacaaggaggcgacaacagtggtcgacgtcgggcggcaggcctcctcctacccatatctggcaacggtggtgagagcggtcggcggctcagcggtaggagcagcggcggtgggagcggacggtggcggctttcacgatggtgatttgcctcctcccgcccggatccagaagtggcgggcctcctgctgcctggatccgacagcaggaacggcagtggtgggagcggacggcagcggcggctcgcctcctcccgcccagatccgacggtggcaggcctcctcccgcctagattcggcagcgggagcggacggcaatgggagcagagggcacgacgccggcactcggctgacgtgattttttttttggatttttatttttgcatgcggcccacgtaagcaactacatgcgaaaatagcaatttagcatgcgggtgcaacgccctcatgcgaaaatcactatttttgcagaccttctcgtgcagacggcctggccatccgcttgcaaaaaccaaatctggctgtctgaaaaatctttttttaagtattgatagtctatacaaatgcaacgtgtgttgtccgccgactagtctaactgtaatagttttacattgggaagtccatcgagttttttaagtattgatagtctatacaaatgcaacgtgtgttgtccgacgactagtctaactgtaatagttttacattgggaagtccatcgaaccagatcgagaccaaactcgcgttatttttttaggcttgttagctagtgtcaagacaagataagttggttgtgtatgattaattaaatattagttattataaacttgaaaaatatgttttatttaattttttaaaaagctctatatagaaaaactattgtagtaggtcaggaagtgtgtttatagaaaaggagtggtagctgttaaatatgtgatccgaattttgggcccataatatattcggattagtttcctagtaggagtcctattaggtgtctttctattatcccctatatatactcttgtaagccgtacgggaaggggtgacgttcctattatgattcccctacgtttgtaatcatctcctctatagtgatcattgctggtcggcgcccgtggtttttcccgcaagggttttccacgtaaaattcgtgtctccgttgtgcatatatttttataacaagtggtataatagcattggagattcgatcaacaactatcccatcgtcgttctgcaattcggcgagattatccaccagcgcacgttcatcatcggcgacggcaggcgcgtgtcgtcgctcgtctcgtcgattcgtctcgtcttcgtcgtgctgcctacgcacgcgagaaaaaacaggaggagcagcagccggtctccacaccacacgtcgggggaggagaaaaagcagcagaaaccaatctaattgcgcacggatcccaaagtgaagaaaaagtagggcaagtcagtcagagccatcatcgccctgttctgtgaattcaatttcacgttgagaattgctatggccacctaagcttgtgtaccaggagattccctgatctacgctacgtgcacacataaagtgcacccagaggttcgtgattttgctaggtttaccctaatttcttactagcaaattttaggattaattcctatggcgagtttgaagtatgatctaccgctcctggaccgagacacaagattctcactttggcaagtgaagatgcgagccgttcttgcacagcaagacctcgatgatacgctttctggatttgacaagaggactcaggattggtccaacgatgagaagaaaagggatcgtaaggctatgtcatatattcatcttcatctatctaacaatattttgaaggaggtgcttaaggaggagacagccgctgggctgtggttgaaactggaacagatatgcatgactaaggatctgaccagtaagatgcacctgaagcaaaagttatttttgcataagttgcaagatgatgggtctgtaatggaccatctctccactttcaaggaaattgttgctgaccttgagtctatggaggtaaagtatgatgaagaggatttaggccttattctattgtgttcattgcctagctcatatgcaaacttcacggatactatactttatagtcgtgatactctaactttgaaagaagtttacgatgctttgcatgccaaagaaaagatgaagaagatggtaccctctgaaggttcaaattcacaagcagaaggcttggttgttcggggcaggcaacaggagaagaacacaaagaaccaatcaagagataaaagctcaagtagctaccgtgggagatcaaagtctagaggcaggtataagtcatgcaaatactgcaagagagatggacatgatatctctgagtgttggaagctacaggacaaagacaagagaactggaaagtatataccaaaaggtaagaaagaagaggaaggtaaagccacagttgttactaatgagaagtctgatgcagaattgcttgttgcttatgctggttgtgcacaaactagtgaccagtggattcttgatactgcatgcacctatcacatgtgccctaatagggattggtttgccacctatgaagctgtgcaaggtggtactgttttgatgggtgatgatacaccatgcgaggttgcaggtattggaacagttcagatcaagatgtttgatggctgtatcagaacattgtcagatgtgcggcatattccaaatttgaagagaagtctcatctctttatgtactcttgatcacaaagggtacaaatattcctgtggagacggaattttgaagataactaaaggctctcttgttgtgatgaaagctgatattaaatatgctaacctgtaccatctgcgaggtacaactatattaggtaatgttgcagcagtttctgattcattatctaattccgatgctactaatctttggcatatgcgtcttgggcatatgagtgaaattggtttggcagaattgagcaagcgaggattgctagatggacaaagcatcgggaagctcaaattttgtgagcattgcatctttggcaagcataagagggtgaagttcaacacatctacacatactactgaaggtattcttgattatgtgcattctgatttatgggggcctgctcgtaagacatcttttggaggtgctcgttacatgatgactatcgttgatgattattcgcgaaaagtttggccttatttcttgaagcacaaatatcaagcttttgatgtgtttaaagagtggaaaactatggttgaaagaaaaactgaaaggaaggtgaaaatccttcgtactgacaatgggatggagttctgttctaagatattttaatcatattgcaagtctgaaggcattgtgcgtcactacaccgttcctcacacacctcaacaaaacggcgtagctgagcatatgaacagaacaattatatcaaaggcccgttgtatgttgtctaatgcaggtttgcctaaacagttttgggcggaagccgtttccactgcttgttatcttataaatcgatcacctagctatgccattgataagaagactccaattgaggtatggtctggttccccagcaaattattcagacttaagagtatttggttgtactgcttatgctcatgttgataatgataaattggagcctagagctattaagtgcatttttcttggttatccgtctgctgtgaaaggctataagttatggtgtcctgaaactaaaaaggttgtgattagtcgaaacattgtcttccatgaatcagttatgttacatgacaaaccttctactaatgttcctgttgagagtcaggagaaagcaagtgtggaggtggagcacttgatcagttcagggcatgcaccagaaaaagaagatgttgctattaaccaagatgaacctgttattgaagattcaaattcttctactgttcagcagtctccaaaacgttctattgcaaaagataggcccaaaagaaatattaaaccttctcaaagatatattgaagaagcaaacatagttgcttatactttgagtgtggcagaagaaattgaaggtaatgcagaaccttctacatattctgaggctattgtttctgatgattgcaatagatggataactgctatgcatgatgagatggagtcacttgaaaagaatcatacttgggaattggtgaagttgccaaaggagaagaaacctatccgttgcaagtggatcttcaaaagaaaggaaggtatgtctccaagtgatgaggcaagatacaaagcaaggctagttgctaaaggttatagccagattccaggtattgatttcaatgatgtcttttcccctgttgtgaagcatagttcaattcgcactttactcagtattgttgcaatgcatgattatgaactagagcaaatggatgttaagactgcatttttacatggggagttagaagaggacatttatatggagcaacctgaaggttttgttgttcctggaaaagagaacctagtctgtaggttgaagaaatctctttatgggttgaagcagtcacctagacagtggtataagagatttgactctttcatgctttctcagaagtttagaagatccaattatgatagctgtgtttatctcaaagttgttgattgttcagctatatatttgtttctttatgttgatgatatgttgattgctgcaaaagacaaatcagagatagcaaagttgaaggcacaattgagtagtgaatttgagatgaaggatttgggtgcagcgaagaaaattctcggtatggaaattactagagaaagacattctggcaagttatatcttagttagaaaggttatattgaaaaagttcttcgtcgtttcaatatgcatgatgcaaaaccagtgagtactcctttagctgcacatttcagattatcttcatattaatgtccacagtcagattatgatgttgagtacatgtctagagttccatattcaagtgcagttggttcacttatgtatgccatggtatgttctcgtcctgacttatcacatgcattgagtgttgtcagtagatacatggctaatcctagcaaagagcattggaaagctgttcaatggattttcagatacctacgtggtacatctagtgcttgtttacagtttgggagatctagagatggacttgttggttatgtggattcagattttgctggagatttagataggcgaagatcactcacaggttatgttttcactattggaggatgtgctgttagttggaaggcaagtttgcaagcaacggttgccttatctactactgaagcaaagtatatggctatttctgaagcttgtaaagaagctatttggcttagaggtttgtacactgagctttgtgaagttacgtcttgcattaatatattttgtgatagtcaaagtgcaatatgccttacaaaggatcagatgttccatgagagaacaaagcacattgatgtgagatatcactttattcgaggtgtgattgttgaaggtgatgtcaaggtatgcaagataagtactcatgataacctagctgatatgatgacaaagccagttcctgctactaagtttgagctttgctcaagcttggttggtgttacagtatagtcctagagactatttggcgcgcggtgattttacctacatgaggtattttttggtgattgatgtttttatgctacaagaggaaattcgtctcaaggtggagattgttaaatatgtgattcgaattttgggcccacaatatattcggattagtttcctagtaggagtcctattaggtgtctttctattatcccctatatatactcttgtaagccgtatgggaaggggtgacgttcccattgtgattcccctacgtttgtaatcatctcctctatagtgatcattgccggtcggcgcccgtggtttttcccgcaagggttttccacgtaaaattcgtgtctccgtttcgcatctattttcataacagtagctaaatccaatagctgaatcacagcctaaggatatacagtatatgaattacgaaaggctgggttatctgtcctgtgtgtttgcaatttctaaaagcttttgtttttttgaggtgcatatgttggtcatgagcagaccactgataaagttacatgggtttctattctagttaaggatctctccttcgtgactttggtgtacataacaagctaccaacggtccctaaaataagttctcgcaaaaaagaaaaaactagctagcaacgataaaacggtagtaagtcatgcatttttccagatgctatcactgatgtgttggagtttaatctttcttaattacataagatattagcccctatatatgatcacctctgcttaatgcaaaaattgatctaactgatgatcttgtttttgaaagccattaagcatgtatttggttttgctgtttttccttttgcctttctcctcctccttctgttcttgtagttagtagaggaagctggggcggcggcttcaaggacgctgcaaggggtgcctgctttttgtttatgaaaaaaaaacctcccagagataccttatgaaccccttgcagtgtctaatcgatcgagcgattggatttagattttagggttagagagaactcaagggttatagagaactcaaacgtcacttatgcttctcctcttctttcttttatatgtgatgctggtggggttcacgagtttattttcaattaaaatttaaatccgatttttaccgataaaaaaaagatattatctcttatttgtttcttgttagctagctagtgtcacgcccggaatttctatccaaaattccaaacgcttacatgtgtgtaaaccctcgtccaggaatcagccgaggcacacaataacaaattgataatagagtgcaattattactctaattgataagcgaatataaagtcattacagaggtagatagttcctctcaaacaataaagatctaagcagcggaaaataaaataaagagcgcaggcgactccatcccacaagcagcttgaccagggctacgcctaaccctccacaccttcagcatcactgtagaactcctcctctgatgaatgattgcaaggtgagtatatgacatactcaacaagccacgcagcaaatatgcaagtgcaggggataacaaaggatggcataaatagtctcatttgcataaatggcattcaataaatacttcagaatttagaaaaacagtaaagtatctaagtaaacaatattattccaacactatacaacatacccgttgcataggcccaaccattctgaacaaccattcccggctgcacagttctatctccaaaccaggaatataccattccaaaccaggagctaaacaagttattaccaattacagcatcatttattatggtgtgaggcatgagactaatcacgaaagacattgttagacccgcccataaccgcgggcacggctattcgaatagttttactctggccagaggtgtaccactgtacccacaagacacaacctcaacatcatgtcaactatgcgtcgcgatacttaacaagtacccgaatagagattgtgacaatacccttcgcataacacaattcaaagcagcgcaccattcctggatcataatcacccccttataaaacaaggcatggactccccagcgacccccgtgggcttatctccgccacttctcagtctggtgccccaaaatgaaccacactatacaaaaggtaaaaccgttgcccacgctggcttgtgattggcacggttaatgtttcacgaccgaaaatcgtgaaccggtccttaattgtcatcagcacgaccatcaaaaccatgtgctcacaacccaccattaccatgttttagttggcatcttaattaatcaacatatcatgattaaccatcatgagctaccattaagtcatcattaagtaataaatcattaattatcccattcatatgagctagtgtctctaagcatggctaagcatcctaattactttagctaaaaccatataatgttctagctaatccaattattaaccaggtgacaaagtataggcaatcaatataaaaaggctataacaaaggaaataggtcattcccacccggcgacattcaaaaataaatgcattatttgaatagaaacaataggtttaaacgggatcaacatgctcaaaggattgtctgggatctgtgtgacttgccttgctggccttggaacactttaaagtcttctcctgcaaattcggactctccgggaacgtcgcaatctaagcataaaagagcaaaatcaccaaaacagtacataaacaatcataaacagcacatgttgatatttttaaatgtagatctcaattttagaaaaatttagagacttgaaccaactaaatccgagctaagatgaattagttatgaatttttaaagattaaaccggattaaatcatttatatagattttaattggattatcacgcaataaagaattatttttgaaaaggaaaaatgatttattgcatcagcgggctcgggttcacggtggaccgggtgcacggaaacggtctacggaacgaacggctaggatctaatctagacaaaacggacggccgagatcgacctaatccaccacgggtctacggctgacgtggcgctgacgtcgacgatgacgtcatcacaggcggcggctcggcatctcacgctcaccgacgaacgacggcgcggcggcgcaaacggagggcatctacgcgtagagggcgacgcagcgaactcacagagggctcggacgatgacggacggcaaccgacggcgacggcggcgaggtcgaagcggcggaggtgttcgggtcgacgacgacagcgatgctccggcgatcctcgacagaaacggaggacaggactaggacggcgatgacttggcgaacccgacggcggccttcccgagcgacgacgatgaccagagcggcggcggcgcacggctggacttgcggcggcgacgacggcgcagacgctaacgcggctagagctctaccggcgatggaaggctaaggcgaaggtggcggcggacggaggaggtctcgggggtccttttataggggctagggggcgacgtctaggcccacggcggccggcagcgacgatggaaagtttagggttggagggagaaaacaaatccgaatcgagatcaaatccggcgatttccaaacgaaaatagccaaagtttttgtaggggaaaagatagaggaggtcaaggggatcatttcccctctaccaatttgatcggatcgggaaaggggcgacggaatttggaagggcggcggcggcttgcgcgcggctagggcgcggctggcggcgagaggttgaagacggccctgacaagtgggccccacctatcagcaagagagaggagggagagcgtggcggactgggccggcttgggccgggcgcgcacaggccggggagagagagacttgggccgtctttcggcccaaagccaaaagaggacttttaaaacctttttccttttaaattattcatgaaatgaaattttatttattaaaaatactttcttggctcaaataaatcccagaaaaatctaggaactatagaatcaagagaagtatttaataaaattttatctagcccacttttatgttggaatttattacttaaaattagatcttttcttctaggcttttaaaatcatttttaataattctatttaaacaacaatttatacatttgggatttttaggctgtgacagctaggaacggactagggagattttatcattttcctaactaaccgatagtagccaacagtttctatcattacgtgactgaataatagcgcgcaatttgaattgaaatagcatcatcatcagacaaattttgtcttttgctgtgccataactagcgcttaagcaatacaaggaatacgattacttacttttaagctttccttgagcatgatcataacgacgaaattaagcactctaatgctattcgggcattaagccatttacaactttacaaaaagtcttccaggtgattcaagtttcgtgtgttaaaattaagtaattccttcatatatgcttaaaatgtttggcatgttttgtctgttcaagattgtacagtaggagtttttgccggccggtcggcctaattttacaattatactagctagtatctttcagaaaataacatagataaggcaactagctagtatcttctaataacaactggtttatcagaagatagactaggtcatcaggacattaactttaacttagttgtatcaaaactttcaggacattgcacccttagctttagttgtatccaaactttcaagaccatacataaggtcatcagaaactttcaagaccaaacatgaggtcatcagagatcaaactagctagtcaaacagaagtaaagttcacaaactacttactgacgagccagggttatttctcttgctgagggaggaacctcgcaacaagctccatgagaacagacgggcaactgattttcagatgctcataatcatcactggccatcatcctctcaagattggagcgagaagcaaggaactcaaagcaagcttccttgagtccatagcaactgtgctgctcagctagggccaaagtggtagccaccatgttggagtcaatgtgctttgatagcttctcctcgcatattagcttcagcctcccgacattgtaccgatctgctgccacaactaggtgctgagccatcacaatattttgagcagtctcaggcagtgagtcagtgtagatgaaatgcaacaatgctctgaacaccccagcttctatatcttcaattttgatggtcctacgggctttagcactcatggcgccaaagaactcagctctgaagacagatgaacgagcagcgagtatgcacttgtgcgctgagaatatatcctgaccaacgttgaacgtcacgtccgtactatccatgttcttcaagaggaggtctcccagatgctggtgcaggtcactaggaggaaccaccacaaactgcttttgtgtggtttctttgctacagatatccttcatgacagtcaaatcgcacatgatggagaatgaatcgttgctcaaatgtactgagcgttccaaatcagttttcttcatgaacttagagtggccccaatctgaacctttttccgtgaaggtgtgtaaagggtacaatttgctgtataattgcactgatctaccattcttgtctagcaatgcaaagctgaaggttgccttcacgcccccggcgcaagcaaaatcaatggtcagaaaaaccgacaggtaatccttactctctgtgttaactccattggggaagtatgtgatgaaccagctatgacctccaacactgaatgggatagatgaaacatacttgccattctccatcagctccttggtccttaagtatccatcaatcttgattacatgcgaccctcttgcaacttcagcaaccgtgacagaggaggtgttgttgcaatggtttgccattctggaggtgagctatcagctatggtgtttacagcagcagcagttcagttgtacctatgtcagaatataagtaagtaaagaattttgagtagtttactgaataaaaaagtccctcaacaagaggcgggcccaccgtgattcaaaggtattcaaatgtactatctactaagtggcatgttgtacgaccatgaaaatccacccgtaagaagttacttatacttaatatatgtacaatgaatagtatttaaaaatagtaatatttatcaagagagttcacggtagataaaaccaagcaggaagctgctaattcattacgttgattcctcacatgaataattaactggaattgattaatggcaatgtatatgtaaaggtagtaacaacacaacactataaaatacttctctctagcacaatatatatattcagataacataataaactattattacgatatattaagttcctgttaaaggtatgttcttctataaatggaatataaacagtatagtcatgtcttaagagtacaataaataaattaactattataaagttaaataaattttaaacaacttttaaaaattcatatatagaaaatttatataaaaattgcaacgtttagtaagtagcatatgacgctaaatagaatgtgatattcatagcaattgaatgtagtagaattcgcctattctttcgatataagagatgaatccattatccacccaacgattggtgtttacggcagcagttcagtttgtacctatgtcgagtatatgcaggtaattaaagaattttgagtacttagtaccaaataaaaaagaatcccctcaacaaacaaagtacagatcgagcaacttttcttgaaccagatgcatgatgttctcatcaaactatcacgagcatagaaaatcgaaggatatctgaagccaagatgcctgttctttagacatagcaatctgaattctgaaagaccaagcatatatagtacgattcctacaaagcaagacattcgagaatgtatgttacctttcttaaatattgttctggcgtgccaccgcgcgccgcccgccggcgccgggcttcgagcagatggctgaaaagcactgcagtaacaacgtgcgacgtggggagaggggggcgacggcgacggcgacggctgcggcggagtgaaggttggcttggctgtgcccttccgtatcctctgccgtttgccctccgtactaaccatagagataatctcaaccctttattttaaagggttgattagtaatatagtactacagattagttgtagattagattgaaatattgcagcgtgaatgcgtggtggctgcgacgccgatcaccactaggaggatctttgatgccatacaccaaaatttatctgctaatactaatatgtttgatcaatccaagttcttggttcttgcgttgttgttgtgcgtgtaagtgttttatatgatgttaccaggccaaggtgcgatttgattcatagttaagtgtggttattcttatcgccttaattaggtcgattagccaccaggaattaaggttcgttgatatgtagttcttttttcgttgcttctaataatggcaaatgaaccaagtgcagcaagggttagtgagtgtaaaggacgattatgccctccacgaataattttcctggacaaaaatacactccacaattctactaccattaattaagtgtggtggtagttagaagtagatctaaactcttcaatcaaataagatcaacagtatatattactttctaccataggtacagtgcatagtagggagcaccggagtgggactcctgtatatatggttctctttgctgttgagaaatcgttgatcttacctttccaataaatggcgaggataatcaagacttgttgatttctttcttctggtagtacttttcctttatagaacaattgtgcatttaccatttcatcccatttcaaaacacggttctctagggcaatgttgtatgttgtataaaggcatacaacacttcaatatcatggggctatagtgggacagaggaagataaatcggcaaagaagtttcgtggtttggcttccttatcacagttggtgcagacagtggcgaatctagaaaatcgattcattggtgtcataacgtgtctatcggtgtcataatactaattatgcttagatcatggtgttataacatatggataagcaatttcgctatagattttgctgtaagttatcggtgtcgcctgacaccggcctttctactgtagatccgtccatgggtgcagaacaccatttcctttccttttctggtatctttattggatctccagaactttaaacaaatcaacaaaacttagaacttgaaatcaaaacttcatgtccaaaatccaaagcgttcatctaacaaccaaaaaccctttatttcaacccaaaatctaccttcttataattctcaaaattataacacaaactatcaaaagtttcaacccaaatcttcaagtttctactcatgaaccaaactttcaacacaaagtcacaaaactttcaagcaaagtattcacaactaatacggcggaggatggcggtgcagagtttctattctcccggatctaagaaaatctaaccaatttacaattacagcattttagtatatttcagaaaataacataaataatctacagataggataacatagtaaaaatatatcattccacacatagaaatactcagtagagaaaatggtaagaagaaccaccagttgattcaatattggaaagactaggtagattgaaggtcgtagacaaaactagacatgaggataaattcaacatggttgtcccacaacattcaggatattgcatccttagtgatcgaagtatctagtccaacagaagttgtactaaatttcaccagctacttactgaagatccatggttatttcccttgcagcttccatttccggagagatgaatctcgcaataagttccttgagaacaaatgggcaactaaccttcaaatgctcataaccttcactggccttcatcctctcaagattggcatcagaactaaggaacttgaagcatgcttccttcaatccgtggcagctatgctgctcagctagagccaaagtggtagccaccatgttggagtcaatgtgctttgacagcttctcctcgcaaatcagcttcagcctctctacattgtaccgatctgctgcgacaagcaagtgctgagtcatcacaacatctaaagccgtctcaggcagagcgtcagtgtagatgaaatgcagtagtgatctaaacacaccagcttccatatcttcaattttgatggtcctatgggctttggcactcatggcgccaaagaactcagccttgaagacagatgaacgagcagcgagtatgcacttgtgcgctgagaatatgtcctgaccaatgtcgaatgtcacgtccgttccatccatgttcttcaggaggaggtcgatcagatgctagtgcaggtcacctggaggaaccaccacaaactgcttttgtgtggtttctttgctacagatatccttcatgacaattacatcgatcttgatggagaatgagtcgtccataagatgtactaagccttctaatttaatcagttttcttcaagaacttggagtagccgaaatctgaactttttcccgtgaaggtgtgtaaagggtgcgattggctgtatgattgcaatgatttaccattcttgtcgagcaacgcaaagctgaagtttgccttcatggccatggcgcaagcagaaccaagagtcaggaaaaccgacaggtaatctgtcacatcctgattttcgtttcaggatttataaattatctaataaattattaatagaatttatattaaatgttctttaatttacaagtgaagttaaatgtgggaaataaaaatttcctaaatttaaagcatggatggatttaattttcattaaattctccatgattaattatactctctgaaattttctcggattttttggagctcaattcctaaatgatacaaagaacagttcaataattatttaatcattaatgatctaattataattatgttaagtgcttttcttgtttaaaaatccttaaattataaaatgttgtttaattggaattattagaaatgatcttaaaagcctagaagagaagatctaattttaaataataaattccaatataaaaatgggctagataaaattttcttaaatactttgcttgattctatagttcctagatttttctgggatttatttgagccaaggaagtatttttaataaatgaaattgcatttcatgaataattataattgaaaaaggttttaaaattctcttttggctttgggccgaaagtcggcccaaaaccctctctctctcctccccggcccaagccggcccgcaaccgagccgccgctctcctctctctttctctcccgctgacaggtgggccccacctgtcggactcgtcgtcctcctcgcgccgtcgcccggccgaaccctagccaagttgcgccgccgtctccttccaaatccggctgcccctttccgtttccgatgaaatcaatagaggggaaatgatccccgggatcccctctatcttttctcttatggaatcgtcggctaatttcgtttggaaatccgtggattcgagttcgattcggatcgatctctctcctccgaaccctaatctttccttctcgtcgccggtcgccatggaccttcgccgcagcctccttgcccctttataaggacccccaagcccgccgctacccgtcgccaccctcgccttagtctctcgcagccggtagagctctagcgccgtgccgcctcgcgccgccgttgtcgccgccgctccagccgtgcgccgccgtcgctccagtcgtcgtcgtcgcttggggaggtcaccgccgtggtcgccgtcgcgtcgccatcctcgtccgcccctccgccgttgctgtcgaccgccggaacaccgctgtcgtcgtcaagccgatcgtcgccgccgctcttcctcgacgccgtcgccgtccgttgatcttccgccgccgctttggtcactggtgagttcgccgtgccgtccgctacccgttggtgctctccgttcgcgccgccgcgccgtcgttcgccggcgagcatgcgccgctcgagccgtcgccggtgatgacgtcatcgccgaagtcgtcgttgtcgtctctcgtagtccggccgtggaccggtcgatctcggccgtccgttttggatggaaagatctagaccgtccgttccgtagaccgttcctgtgcacccggtccaccgtgaaccctagccgctgacgcaataattcccttttccttttcaaaaataattcattattgcgtcataattcaattaaaacccatataagtgttttaatccgatttaatctttaaaaattcataactaattcatcttagctcggatttagttggttcaagtctctaaatttttctaaaattgagatctacatgttaaaaatatccacatgtactgttcatgcttgtttatgtgctgttttggtgttttgcttctttctgtttagattccgacgtttccggagagttcgttttcgcaggagaagaatttgaagagttccaaggccagcaaggcaagtcacacagataacaaacaatcctttgagcatgttgatcctatatttaaattctctatttatttcaattgtgcatttattttcgaatgtcactgggtggtgtgaatctattcctttgttatggcctgtttgcattgattactttattccttgataccttgggttattataacttgactagttgagctttatatattggttcagctagatattagatatgattgcttagccatgcttagaaacattagcacactattgggataacttatgactcactattatttaatgatggcttaatgatagttcacgatggtcaatcgtgattggttaattaattacttgccaactaaaatttgataatggtgggttgtgagcacatggttttgagagtcgtgctcatgacaattaaggaccggttcacgattttcggttgtgaaacattaaccgtgccaaccacaagccagcgtgggcaacggctttaccttttgtatagcatggttcattgcggagtaccagactgagaagtggcggagataagcccacgggggtcgctggggagtccatgccttgttttataacggggtgattatgatccaggaatggtgcactgtggtgagttgtgttgtgcagagggtattgtcacagcctctattcgggtactttccagtatcgcgacgcatggtagacatgatgttgaggctgtgtcttgtgggtacagtggtacacctctggccagagtaaaactattcgaatagccgtgcccgcggtcataggcgggtctaacaatgtctttcgtgattagtctcacacttctcaccataataaatgatgatataattggtaataatttatttagcttctggtttggagatagatctgtgcagccgggtatggttgttcaggatggttgggcctgtgcagtatgggtgtgctgttcagtgttgattaatattgatgattaattactctattgttttataattctcaaatgtttgctaaatgctgcttttgcaaatgagccctatattatgccatcctttggtatccatgtgcacttgcatatttgctgtgtggcttgctgagtatgtcatatgctcaccttgcaataatcaatcaaacctcagttgaagacaagttgcgaaggagaagacgttcggcttataccccagttgagctgcctgtgggagtggagctgaagccatcgctagaccgttaattccgctgctgtttttcttttattttgtaagtatgtaactttattattatgatgaatttgtatattaaattgtcagtttgtgtacctcggctgagtcctggacgaggattttatgcacaaataagttcggaaattactagtgaatttccgggcgtgacataatcctaactgtctgtgttgttcccattgggatagtatttgatgaaccaactatgacccccaacactgaatggaacagaagacacatacttgccattctccatcagcttcactctcgagtatccatcaatctagactacatgtgacccgctcacaacttccgcgacaatggcagatgacgtaatgttgtttgccattgtggagaggtgggcagtgggttatggtggaacactagcagatgaggaaatgttttgcggtgccactgtttatgtttagtaatgtagcggtgggaactgagaagttaaaccggtcgaaagatcgatacatttcctcgatcgaaattaatgatgagctgatgataggattagactatggactaagtgagtaaatcgagatgcatatcctcgatcgcatggcggatttcaagtttggctacacgaggagactccaactcgattgccaaggtatctgtgaattcgtttcgtttcttagttctctctttctgatgtattcaggccttatttggcaagcccggccatgattccctggccatcatatctctggggataggccgattatggcccagcccatgtgcaggacgccggtgatagcagcgatgccatgagcatatttcctggtttgaaattctgagcgcggctcaaaagaacaccaatagagatgataatatttcccggtttcaatacattatcaaattgaggaaattttaaaataaaaaacatcagaaaataaaaataagaaattgagaagacttgttttatctcattttatctgtactgtattttcgtatggtcgaaattcccctagcctaccctatcttcttcttcccagccaacaaggaattagattttataagtattaaacatagactattaacaaaacacattccataactctggactaatttgcgagacgaatctagtgagcctaattaatacatgattagcctatgtgatgctgcaataaatatatgctaattatggattaattaggcttaaaaaatttgtcatacgaattagctctcatttatgtaattagttttataagtaatttatgtttaatactccaaattagtatccaaacatccgatgtgacagggattaaagtttagtccttggatccaaacaccacctaaggatggtgcgataaagagagagcaaggactccggaccatcgaggatggggctggtggtttcctcctctccctcctctcccctctctctccctctctccctctctctctctctgcgcgccggtgatcccctcccacgacgcatcgtcaaccttgtgcttctccatctcggttgaggagtgccgaagatgctcctccccctggggtcgccgagctctagttggggagtgaatcggtagcctcgtgggcatgaagccatcgacgagcccaatcaccccaagcagactccccatcctactggcaagcccaagctactccttgccgatttcatgggcatcgctgacgaggaggaacaagatttgaaggaagagctcatcgacaacggtgctctcgccgcccgcacacagccattgtccgccaccgccggcgtcgcctcgccctgtcaccgcatgcggacagccatggctcaccactcgccatcactgcctttccctcttgccgtccgcacacatccatgcccgtccgccaccgtgggcatcacctcgccctctcgccgcccatagacagccatggctcgccacccaccgtctttgcttttccctcttgccgccctctttgccccacgcctccacgcacccatgcccggagagaagacaggagaggagaagcgaggtgggtagaagatagaagataggagaagagatggagaactgacgtgtgggtcccacatgcatattgggggcctcatcttttcgctcatgcttcagctaaaatttaaattttttaccttaaatttaaagttgatttttggattttttttatcgaagtttgtttttcatcctttgcttttagatagctaagaacatgtataaaagtgctattcacaaatgatttttcatttgcaaatataagcgaaataatccgtttctaggtatttttgttcatctaaaaatacggtagcaaaagaacaattaaaaacatgattgatgcatataaaatggtatggatacaattttagaggtatagcaatggcatagttacaaattacctttggcatttttataatgatatggatcaaattaacccaaatatcaaggaattgtattaactttatttatgttttccctaaatattcaagatatgcatggcatccttacagatggaattactcaaaagttaaaaagaaaaaagaaaactacctaagagccatagttatttgttttgctgctttcatttcatgaggaagcaatctcgcagcaagctcattaagaacagatgggcaactggttttcagatgctcgtaaccatcactttccaccatgctttcaatattagatggagaatcaattaggaacttgaagcaagcttccttgagttgatgacatctgtgctgctcagctagagccagattggttgccaccatgttggagtcaatgtgctctgatagcttctcctcgcataccagcttcagcctctcaacattgtaccgatctgccgcgacaagtagttactgagccatcaccacgtcttgcgacgtatcaggcagcaagtcagtgtatacgaaatgtaggaatgatctgaaaacgccagcttccatatcttcaattttgatattgctcctacggggcttcgctctcgtagcaccaaagaacattgcctcgaagacggatgatcgagcagcgagcacgcacttatgtgccgagaatctctcctggccaacgtcgaacgtcacgtctgctccatccatgttcttcagcaagtcgcccagatgctggtgcagatcacctggaggaacctccacagacggcttgggcatggccggggtttccttgctacaaatgggcttcatgaccgtgacatcgcaccggatggaaaatgagtcgtctctcagagattctgatgctttcaaatccttgctcttgataaacattgggtagccccaaccggtacctctaagtttgaaggttttgacagggctggcgatgctgttcagtagcaatggtcttccattcttgtccagcagtttgaagctgtaaattgccttgacgtccctggcaaaagagtccagaaacaggtacaacgacaggtattctctacactccgtagattgaccattgggatagtatctgatggtccaggtgtagccagcaacgctgaatggggtagatgacagacactcttcattcttgatcagcgccttggtttttgagtatccatcaatcttcattacgtgtgacccgctcacagcttcggcgacaatggcagaggagatagtgttgcaatcatttgccattatggaggggagctatcaactttggtggtggaacactgacatggaaattaaaaggttaatttgctgtgtttcttatagatgcccaaagttaaaaccgattacaagtatatattaaaatctaagtaaaatcacacgaaagattatccagggtagaaagtatttgcaccaaccgaaggatatttgaacaaggaatacagtataagttcagttaaagcttaacaaacagaaaatattcttacattatcagaacgagcatcgcaaatccaagcatatttgcagccaagatgcatgttctaaacatacgtattacccctccgtcactaaatatttgacgccgttgacttttttaaacatgtttgaccgttcgtcttattcaaaaaatttaagtaattattaattctttttctatcatttgattcaatgttaaatatagttttatgtaagcatatagttttacatatttcacagaagttcttgaataagacgaatggtcaaacatactttaaaaaagtcaatggcgtcaaatattcagtggcggagggagtacacagcaatctgaaactcaaagcatattaaagtttcaagagtgtgtacgtttgtcaattacctagttatatgtcaggacattggattaggagtggggaattcttcaggaaaattcagtaaagatggtggtcgccgcaagactcgaacgctgaagaaaaccctaattttactcctactcctaaagacaaagatatagtagattcatttcctgcttcattatgggctaatagccgctataagtagcatacaaatattattacacagctgtaaagctagagttaaacaaccacatgaaacagagcatcttcctctgtcccaaaaaagcaatgacaacgacaaaaacgactacagtggtcccattttgatcttcttttccccttagctctgatcttttctgaacttaactgaagtttccttcccaactctgaaactctgaacttaatctcccatttctcaactcctgtcttgacaattgcccccggttaagttggaccttgtcctcaaggttcaaaagaaggaaaagctgactgaatataagtcgcatcctcctaggtcgcatcagccggcgtcaagttctgccaaagaataaggcactgaattactggttcattgtttcttggaatcatgcgcctttgcaacacagcgactggttcagtcttaatctgtccctcaggacctactgctggcagattaggcataggaacaacatgctgtcctaaatgtttcttcaattgactcacatgaaacactggatggattcctactccttcaagtaattgcagcctgtaagcaaccttccccaccttttcaataaccttgaatagcccatagaatttagacctgagtttcagtgatcccctaatgccaaacgcagcttgtctatagggctgcaactttaagtacaccatgtctccaacctccaacactctttcagtcctattcaaatcggcataatgtttcattcttctctgagcttcacccatgctatccctcaatttctgcaaaatggctgctctttctttcagggtaacccttgcttcttcagatacattgcatggaattgaaaattcattcacttgtgggggtggatacccatacaaagcttggaaaggagtcatctgaatcgatgtacgaaaggtagtattgtaccaccactcagctagagctaaccaggtaaaccactgttggggttcttgaaaggtcatacttctcaaatatcagtccaagcactgattgactctttcggtttggccatctgtttgaggatggtaagccgtactgaatctgagttgtactctctttgccttaaaaatctcttgaaagaatttgctagtgaagattctgtctctatcggtcacaatggccacaggcattccatggagtttgtgaatgttatccatgaacacttgaatcacatcttcaactgtaaatggatgagatagagctaagaaatgggcatacttcgtcaacctatccaccacaactagtataacatccttccctttagatttaggcaagccctctatgaaatccatgctgatatgtgtctaggccatatcaggtacttccaatggattcagcaacccaggaatgtgtacatgttctgcttttgttacttgacatatgggacaagatctgataaaattctctgttgctttcttgagaccaggccagtaaaacaactttttaattctgtgataagtagccctgattcctgagtgacctccaaatgcagatgcataatatgcttgtaacaacatctgcctaatgtcagtactctctcccacataaattcttccttgatattttaataaccctgcctccattctgtaattgccagtaggatctacctcagttcctattatgctcaagaacttatgtgcctgaatatctccttcataactcattttgatatcctgtacccattcaggaattactacagccacagttgaacattgttcatcctcacctactttgagattaggactccgagataggccatctgccactaaattatcctttcctgccttgtactcaatagtgtaatcgtactccagtagtttcaataacagcttgtgttgtattccttcaaccaacctttgccccatcatgtatttgagactctgctgatcagttttaatcaccaactttccccctagcacatagtgtctccactttttgaatgcctctagtattgccatggcttccttttcataaattgattgggctgctgcctttggtcccaaagctttgctataataagagattggtcttcctccctgcattaaaactgccccaatcccatatccacaagcatcagcttcaattacaaatggctgatcaaagtttggcagagctaggactgtactactacacattttctcctttaacagctcaaaagcttcctgttgagactgcccccaactgaacccatccttctttaacatattgtgtaatggtctgcatatttcacgatatcctttaatgaatcttctataataaccagtcaatcccagaaatgccctcaatacagttacactggtaggtgcgtttcgatgtttgatgtcactgattttttttggatcagtagaaaccccttcttcagaaataacatggcccaagtatgacaccttgctaaggccagactcacactagctgattctccattaaagcttgcatcaccaacctaatatgtcccagatgttcctctttgttgttactgtatatcaaaatatcatcgaaaaacaccaatacaaatttcctgatgtaaggagctaggacctggctcatcaatgactgaaatgttgccggcgcattcgttaacccaaatggcattacattatactcataatgccccaaatgagttctgaaagctgtctttgggatgtctttctcagccatcctaatttgatggtatcctgacctgagatctagcttagagaatattttagccccattcagctcatctagcaggtcttcaattataggcatagggaacttgttcttaatagtctgagcatttaactggtgataatcaacgcacattctccacgaaccatccctttttcttaccattaatgcagatgatgagtatggtgtcacatcctgatttttgtttcaggatttataaattatttaataaattattattagaatttatattaaatgatctttaatttacaagtgaagttaaatgtgggaaataaaatttcctaaatataaagcatggatggatttaatttttattaaattctccatgattaagtcaactctctgaaattttctcggatttttcagagctcaattcctaaatgatacaaagaacagttcagtaattatttgatcattaatgatctaattataattgttaagagtttttcttgtttaaaaaatccttaaattataaattgttgtttaaaaggaataattagaaatgatcttaaaagcctaaaagagaagatctaattttaatttgctaaatctcaatataaaattgggctagataaaattttgttaaatacttctcttgaatctttagttcctagatttttctgggatttatttgagccaaggaagtatttttaatcaatggaattgcatttcatgaataatttaaattgaaaaaggtttttaaatctttcttttggctttgggccgaaagccagcccaaaaccttctctctctctccccggcccaagtcggcccagtccgcagccgagccgtccgcccgcacgagcgcgcgctgtcgttgacaggtgggtcccacctgtcggacccgtcgtcttcctcgcaccgtcgcccggccgaaccctagccaagccgtgctgccgtctccttccaaaattcggccgcgcctttccttctccggtgaaatcaatagaggggaaatgatcttcgagatctcctctaccttttctcttttggaatcatcgtctaaatcgctttggaaatccgtggattcgaggtcgattcggattggtctctctcctccgaaccctaacctttccttctcgtcgccggtcaccgtgggccttcgccgccgctttccaacccctataaaaggatccccaggtcctccgctacccgccgccaccctcgccttcgtctctcgtcgccggtagagccctagcctcgtgagacttcgtgccgtagtcgtcgccgccgctccagccgtgctttgccgtcgctccagtcgtcgccgtcgctcggggtggtcgccatcgtggtcgccgtcgcgtcgccgtcctcgtccgccccttcgccgtcgctgttgaccgccggaacatcgccgtcgtcgtcaagccgaaggactccgccgccttttcctcgacgccgccgccgtccgttcatcttccgccgtcgttttggtcatcggtgatttcgccgcgtcgcgctctacgtcctggtgccctccgttcgcgtcctcgcgccgtcgttcgccggcgagcttgcgctcccgagccgccgccggaggtgacgtcgtcgctgacgtcattgggaccgtccgccgtggcccagtcttggatcggttgatctcggccgttcgttttggataggttcgatctcggccgttcgttcccgtgaaccgccgccgtgcgcccggtccaccgcaaaccctagctgctgacgcaataaaccccttttccttttcaaaaataattcattattgcgtcataattcaattaaaatccatataagtgttttaatccgatttaatctttaaaaattcatatctaattcattgtaactcagtttaatatggttcaagttgcaaaagttgtataaaataaagatctacatattaaaattatccataaattgaattaaatttatttaattctttttaaatgggctttaattagatttaatctagtaaaattcataataaattcatttgaagtcagaatgaggccgttcaagtctcataattcatctaaaattatgatctacatgtttgtttactttttatgtattgtttatttggtttttattagtctttttcttcgttttgcgtgttagcttgtcgtttccgtcgttgcgaaggttcgcgagtgcgccggaagtattcaaggagattaattgaagaccgaatattgcaaggcaagtcacacagatcctaaacacaatcctttgagtatgttgatcatatatttaaattctctatttatttcaactgtgcatttattttcgaatgtcactgggtggtgtgaatctattcctttgttatggcctgtttgcattgattactttattccttgataccttgggttattataacttgactagttgagctatatgtattggttcagctagatattagatatgattgcttagccatgcttagaaacattagcacactattgggattacttatgactcattattatttaatgatggcttaatgatagttcacaatggtcaatcgtgattggttaattaattacttgccaactaaaacttgataatggtgggttgtgagcacatggttttgagagtcgtgctcatgacaattaaggacctgttcgcgagctactgttgtgaaacattaaccgtgccaaccacaagccagcgtgggcaacggctttaccttttgtatagcatgattcattgcggagcactagactgagaagtggcggagataagcccacggggtcgctggggagtccatgccttgtttataagggggtgattatgatccaggaaaggtgcgctgtggtggattgtgttgtgcaaggggtattgtcacagctcctttccgaggtaccgtggtggtattgaggcacatggtgacatgttgtggggctgtgtcttgtgggtacagtggtacacctctggccagagtaaaactattcgaatagccgtgcccgcggttatgggcgagttgagcaatgtttttcgtgagtagtctcacacctctcacaataattatggatgttatacctggtaataatttgcttagctcctggtttggagttagatctgtacagccgggtatggttgttcaggatggttgggcctgtgcagcatgggtgtgttgttcagtgttgattaaaatttctgattaattactccactgttttatttctcttaaatgttttgctaaatgctgcttttgcaaatgagcctatattatgccatcctttggtatccttgtgcacttgcatatttgctgtgtggcttgttgagtatgtcatatgctcattcttgcaataatcaatcaacctcagttgaagaaaaaggatccagaaggagaagacgtttggcttataccccagttgagctgcctgtgggagtggagccggagcttcgctagattttattttctgctgcagttttcttcatggtgaggactaagtgcctcttaagtaagtatttatcgttttagttaatttgatgaatctgtatattaaattgtcagtttgtgtacctcggctgattcctggacgaggattttatacacaaataagttcggaaattactagtgaatttctgggcgtgacatatgggctgtcactcaccttgatttctttagactggatcaactcagatataatatcttccctggcctccttctggtaatgtggcactctatatggcctgagattaggtggttctgccccttttttttaaattgataatgtgatcacaattccttctagggggtagtcctttggctcttgtaacactgcagggaactgcatgagtacctcctgaatttcctcaggtatgcttccagaaaagttttcttcatcagaaatagcacacacctgcagtatacatcccacagctcctttcctcaacattttatccacttgcttaccgctgacttgaatatttttccctggcctagtaaaatctcggaattctattctcctcccatctttagttatcccaagctccctcttctttaaatctagtgtgattgggctgtacctaaagatccaatctgctcctaaaatcacatcatatccctttaatggcagcaagttaaagcagttcctaaaatgttctccttgtatgtcatatactatttcaggaacttgtatctcatatctcaattctccacctccagctactaccacccttttggttttggtgtgaatcaaaggacattggtttctaattgcaaactcattgtccataaaagtactggtgctaccactatcaatcagccccactgccttcttcccattgaacttcagtatgacagaaaaagtgtcaggtctactggtcccttcaatagcatttaaagagatactcagtaactcctctttggtttcctcggtttgctgtgcagccatcccttctgcttgttgtccctcttctgatgcctaggaaaccagggctccttgcaaaaccagcacttcctttcttctttcttctccacctcacccctctgctgggctctgtttcctgcatttctacctggtgggccagcattcaggtttaaattcctattcctattaaaattagcagcagtttttcttgcatttgcagccttctcatagttcttagcataccaataggactccaacaatccctgaggtttctgcccacacacatcatgtttgatttctcctcttaagccatatactcctcaaatttatctatatattgctccactgacagcccatattgttttacattttgaaatagttccacttcctcgtgtacattggctgcagaaaaccttgtgcacaccatagcacaccactggggccaggtgatgacctgccaaggcaatccaacacctctgaaccacttagctgctcttccatatagatgtgccactgccaagttaacccactggtctacaggagttccagtaatttcaaaaaattctcacattgctttaaccaatctaccgggtcctcaccagtaaacaaagatatctccagtcgtggtcccttgatcacagcttctgcataatgatttccctccacaaagtgaccatgatgcccattcctttgctgatcaatcacatggactttgggattcccttgaaacacattcactgaccccccagctctttctacccgtggctggaaatgctggaaagtaaaatcagcgaatggaattgtggtgttaggtggaacatttcccccttgggtcgtgtgcatggatgtcccagccgtgtctgcagaagtatgaacccccctcacattgtccctttatggcagagtaaatggagaaacccactaattcattgggagagttggattcacagtgttcacttcaatagcaaattgggactcaggaccctgttgattacctctagcttgtgtgctggtctgtgccacatccgcacccatagcagaagattgtgctccagtccccatagcagcagctgcagtagcagtaaccgtagttgcagcagccgcagcagcagtaacctcagcctcttcaacctccttccgcttacagagatccaacaaaagccccttgatttcttttacctcattcttcaaccctttgagatctgccacctccttcttcagagcagccatgtccacccgaaattcgttcatctcctccatatcaataattgtctcgttcgaccgagtcttggttaccatcaacctcccttgcaagttcagtttaggagtttcccccttccctgttcaccacttgcagtcagatctaccgccgcccgacccagaattggagctccggagattttacaggagcacacctacaaagatggctcaccaaccctcgctcaacaaatatgttgcctatcttttcctcgccaccggattgaatccaccacagctcagggattttacagtggatttcaccgcctccttccaccaaccctcaccgaatggatccaagagccaaggattgttcaagctctgatacctttgtcaggacattggattaggagtggggaattcttcaggaaaattcagtaaagatggtggtcgccgcaagactcgaacgctgaagaaaaccctaattttactcctactcctaaagacaaagatatagtagattcatttcctgcttcattatgggctaatagccgctataagtagcatacaaatattattacacagctgtaaagctagagttaaacaaccacatgaaacagagcatcttcctctgtccccaaaaaagcaatgacaacgacaaaaacgactacagtggtcccattttgatcttcttttccccttagctctgatcttttctgaacttaactgaagtttccttcccaactctgaaactctgaacttaatctcccatttctcaactcctgccttgacattatatgtgcagagctgatgagcagatgagttgagaaaatcacaccgccctccggttcttcctcgcgagcagcacagccaggattggaggagtggagaagcgtcggcgccggcgtcggtgggggcagagcggagcagtggccacgaccagcttcggtgggattggggttgtgggcggcggcggcggcggaggaggaggaggttggcttcgcctcccggaatcctctgaaatcgtagcccttatttccaaatcacggcaaggataaccaggactccttatttccttctgttggtggttattttcccttttatgtttgcttttcgttccgtaatattttagggatttgcttaactgtcatttgtgtaaaaaaaaaattcgttgattctatcaattttcaggttgtcgtttcagcctaaagataagtgttgtcctggtctccttggtggcctactcactacataaaaaaaaaatcttaataggaggacaatgttaatggtaaaatttggtaagatatatttggatttggagataaacactaaagcagatttgtgcatcggttgtagcttgtatcagctggaaatagaggcggattgggttgagccgatgaggcgaaacttgagccgatacagatacggctcgtaacagacccaaattagattacaaagcattgtcgtgcaaggaaagagtccgtttagacaatctaattatgtcaagctggctggtttgcagccagctgattggttggtttgcatccttcaatgctttgttgacacgtgtccatgtaggtattccaggaactgacgcacgtaacttatggatggaccgatgcccttccagaaaagaaaggcagagatggagatcgattgatctatatcaagaaaacacgagaacacgtctgtctctgaactgacccacgttgtttgggccaaatatatatcgcatgccccaatggactacgaggacaaattaaattaaatataaaatcaatgtaatactaataagaataaaaataaatgcataatcggtctttttgcaagttctttatatgaaattaaatattaaacaatattaaaagatttctttaatactatatttatttgttcaattaagttaaatgatatgaccatatattactttgctttgtagtccctaaatttagggtttagtggattttgtattaagctagcaaggacagcatcatgagtatatatcttccttcctgacataattaatatatcttctgacttccataaatttgatgaaaagcccggaaagtttgtaaaaacgtggatggaaaatttggtgttttttattttcttattaagtgcaacagattttgctacaacgattgttgataaaaatatatcctttcatatatggggctagactttaaaatgtagtcatagtataattgtagtttatctataatgtagttacgagtaaattgcattagcggtacatgaaacttgttaggtggtgcaatttagtgtataaacttgtaaaatactcgttttggtgcatgaacttgtttgatatatgcaaactaaggctaaaatggcacaataagaccgatttttctatgttgaacattactccctccatctactttttgatagtcatattttatcttgacacacagaccaaggataaataattctacttatcatccatttaaacatgctactagtcattcctcgtaaacaagcgactcattaatatttacatttctcgatgcccatgtagccaatcttgcgtggaagaatggagagtcacgcattaaatccaagaaagtcattaaaatgatagattgttggattgaaatatgcctatcaaaaataaatttttcagatttagaaatatgactatcaaaaaagtaaatggagggagtataaattagtagatgatgtgcgttcacatagcagaacgattatatttataaactttttactttccaatttatctttctttgtttctatcccttacatcattactcggttttttattttttttatgtaatcattatgccttattatatgtttatccttcttagacacatgtttacatagagtttaaattaacaacaaaatcaatgcgattaaccttgccgtgtgattttgaccttgttcgcatgcaccaaacaagtgtgtgcaccaaaacgagcgttttacaagttcatgtactagattgcacccacctgacaagttcgtataccgttgatgctatttactctatagttatctaactattgtcatttgtgagttgtgacgtgaatctgaatggctgataaatcgactgtttaaaaaaaacacatcaataattttttagctaatatgttcaaatattatgtcttttatgcattttaaatgtaactctaagcacagacaggctaaatagttggtacgccaacgtgcgtgcccaattttctagttatatctaataattagatatttaaaggcggtttcttagatatctaataatcaagagtctaccatgtgggcttgttcgtattttttaagcttagggaagtgagaggtgtgtctataatgaacatagtttgtactctaggtatataaatataaacccagaatcatgtaaaaagcggacgaatcaatacaacacttttggcgagttcttgcttcaagttagggcattgacttcgatcttataacgagagataacttgtctcaattgtttacattatccggcctattatgtcgctttagatgtattaatatctttatggtaagctatcattatcatatatcttagttaatctagtttagcaccacaatttgatcatatcggttggaattcgctttagggttttgttgatgaaaaacacgaggcctaggagatctgcttaactccagtgcaggtccaaaactcgcctttgggtatgctagcatgccagttgatttgatcctgcaatcaacaagaaatacagacaaagaaaccgtggttaaatccataaatgatagccgatcggctaggtgccgatgacgtatcatttatctttgagccgatgtcatatgtaaatcgatcggcagttataaatagataataaagaactaaatctactcgatcggctgtagatattaacaatatataatcctggtgtcgatatatacttaaatcaagtgattcggatagatcggtcgccatgccgagacaatataaatcacttagatcgaaatatatattaacaacaagactatgtatgttcatagcatagccgatcagatagatctagcatgtattggctaatactccgatacaactctatgttaagatattaaaacaaacagaatatactaaacagaagcttaatatacttagatgcaataagatcttgacataaagggcagattcaacatgtcaataaaacatatagagcaaatgtagttaaatcagataagatcggctgaaatcccgatatcggcaaccagaaggcaggctagagattgatattccaagcacgacttaatagatcaaactcaactcatgcagcattaagtatgaaatgaagaacaatatctagacagtcaagccgccggaagtttcatagtgtggtggatatcttatataatctaaatcaacattgatatttaacctaatcggctgccctctactgacagatgttagccgattgtaggttaaatagcgatattgctagagattatggaagatatatgataactcgacggatttacataaacaagattagagtatcataagatggaagcactaatcccgagaacgcaaaccgtcataacaagttttacctcttgttgaagatcgaaaccgatgcagctcaatccgaaagcaagaactcgttgaaataaaactaaagcaaaaagggtggcgatgcgccgagattgtatcgaacgtgtgtgttaattaattccacctcgatctaatctccatctccgatactgatactaccaaatttggttgttaacacatgccccccaagtctggaatattggataatgtttcggatttgccatatgccgattccaagtgaaattcactcttgccgttttccgaccattattcccgtgctttaaatactaaccgttaccccccgagaaatctcacaccatcctcttccattttcaccgctgaagcaaactttgccttctccctctccggtgattcctccgacgcaaaaggcgatcccaaggcgattccatctccggccagatctccgcccgttgtggtgtcgtcctccgccagcccatccgcgccgttagccgagtacgctgaggtgagttctcatcggctagatctccttttcttgcaccggattgatttcccctttcctcatcttgttttcctcttctcgattcttttggatttgtagcacctctccaatctagttgcgattcccagcctatcgcatgaaaaccattactttcttggtccaatcggcaaccttgaccctactgagttcatcgttggtgaaccaaatagggtccctttcagattagccaacccagacctaggtcactggaaaaacacctttaaatcttggccatcgcttgagaaaaccccacccgagaagagctggattacgtggtacaagcgcgtatcggctagtaagaaagttcactggaacgagatcgggatcggccaagcgcttgcccttaccatagccaattcagctaaggatgaacctctgatggccgccgccacttatttctggtccaacaccatcaatgcctttctgttcaaccaagggtcgatgactccaactttgatcaacatcaccatgatcaccggattagatataacttcattggctaaccctatgagtatgaacaccaagaaccaattttacttcaggaccaaaagcatagggggttggtctggctatgcagcaacatatatgggtaaaggacctgtcactcctcgggagcatgtagctttcttgctaatgtggctagaaaaattcctcttctgtggatccagttgtggacctacaaccaattggcaatttgtagccgaagccatagaatcaaagaaacaatttcctttgggcaaaatcctcctcagctatctataccaaatgttgaataatgcatcggggccaagatagctgtcggctcagtaattggatcaggtggaccatggtggttgttgcagacctggctaaatctgatggtcatgaaagttgtcaattggccatctgtgaatggaagatgatgaagaagaacgcactcatcgtagatgcatgtcatatggagaatacgcatctacgccagccgatgcttgagcaaagctgtcggccgagctgctcaaggattggttctgcagcttttatgagggttttcaaaaagatgcccgggtctggtttccttataaagactcagcagaccttgaacttccatcagacttcagatttgaagacattaatcatgaaagataccaaaaagccagggaagttttcacagctgcaatcagcccatgcattctacctgtcggcatttatcagggaagaaacattcatgtctcttatgaattttaccacccgatgagctcaggtagacaacttggattgggccaactcccaatcggcctattcttcgccgacaagatccaatgccgaggggaaatttcatcgaccttaatgatggattagctactcaatctccaaggacctcctttaggcagtattgaaaatatcgagctgcgggtttcaagagcaaaaactttgatagatggtggggcgagtggaaactgcatctattccaccaatcggcttctatgtatatgacatatctcttccccgatgttatacctcaggtaaactttggtctcattaattctgtttgaacaactatcagccgattcataattcaactaaccttttcttctattttgcagacaacagaatcttcccctccacatcaaagcaacagtggtagagacatcaaatacgccccaggtttaattccaaatggaggtggactatcccctcctgtcatcggctacaatgcccccaagacctcaacccttcttcaagggctcatcagagaaccatccgatgcaggcaaaaagagaagaaccaggtcatcggctacagacacattagctctagccctgaaaaagaaggccaaactcaagaaacctaaaccagccgatgatctgcctgtcttggatccatctatcgaacaagctctagatgaagaagatattgaagatgatgttgatcaggctgtagccgaagtgagtgatacagaaagaacaccatcggcttcgcccaagcagacacctccaactccttatgccccaactcatttctcaagagtaagcagctctctttgatccttttcgtaatcgctttgttttctcggctgattaatcactgattctttatagttgcagaagaagaaaattgctgtaaagaggaaattggcagcaacaattctcaaaccagttccaccagtaagatattcttaattttactgtttgatttcagccgattttgtctaacacttgtctcttttacaaccccttcctccttctcctcctgtacagcaatcatcaagtgaccgaactccatcggctgtagggagtcatcacattgaagaagaaatacaaccagctgctcctaccatcccggtaagtcttgtcttataacaatcttgaatcggccacataactcatgtcgagactcagtttaaaattctttcttgcaggccttagccgatctgttttcttttgacattaaagattatcttgacgaagaagcagaagaggataccaccagcaaatctctggttcccttgtccaatgatgtgaagaaaacccttgaagacatctctcatcggtggaagcatcatcactggacaacttggtggtaaactatggaccgattaggactcggctacatgagatccaagctctaatcccagatgagctagccgatatccttactctagcggtccatcttgagcaacatcaattcaagctggagaaggccaagctaagactagccgaacgtcgggagcgcaaagatatcaaagctacaatctaaaccaatcggcagcttgttcatgaagagaagaccaaacttgatcagctatctgagggtccgattaagtccaatattaatcggcttgaggctcgcaagattgagctcttggcacaacttgaagaatgcaacgccgagctggatatagaacacaaaaagctagccgatctcccaaaatctatcgaagagcagaaggcaagacttaaatcggccatcaagaatgttgctgttctaaccaagtatttgaaaatcatccctggaaccaatgctcaagacgcccaagccattgaagaagtagaacaaattaggcaaagggctatatcggctatccaacactatttgtcccagtgactttttgtatattaggccttagaaatttttgtaatcggctaagatactctagtactttgctgtcttgacaatcctttatgccgattaatataattcgctcaaaaatttgcaattttccatgtatgtgcccccctaattttacaatgacaaaaaaaacattgataaaaatatataaacaactaagggcgatataatcatatcggccattgcacattggcaaccacaacccattacaatatgaaaaacaacaaagggcgatataaccatatcagccattgtatatcggcaaaccacaaccgattacaatcgaaaaaacaactaagggcgatataaccatatcggccattgtacatcggcaaaccacaaccgattacaatctaaaaacaactaagggcgatatgaccatatcggccatctcaaggcgatgaaaaaatatcggctatcatgtatcggcaacatcagccgatcatgcattaacccaaacacttgggtaatatttcttcaagtatttgccatttagtgctctgccataaacttctccatcgagtccttgcaacaggtaagctcctttagatacaactttataaatttgaaacggtccttcccaattcggcgaccacttgccgaatttgctatctcgagttccaatcggcaaaatcaacttccatacaagttccccttctgaaaaatctttgggtaccactttcttgttgtaatgccgagcaacccgttctttatccttggtaaccttcgcaagggctcttaatctagattgaaccaagtcttccctttcatcagccataaggttataatactcatcggctgttaaattatcttgcaactcagttctccttgagccgattctaacctcccatggcaaaacagcttcatgtccgtaaacaagcttataaggagggacatggatcgatccatgacaagccatccgataagaccgcaatgcttcggccaaccgagtatgccactgccgaggatgatcggaaatctttctcttgatcaatttgattaagctcttgttagatgcctcgacctgcccattagcttgtgcataatatggtgaagaattcaacaatttgatacccatgctatcggcaaactgaacaaactcatcggacacgaaaattgaaccttgatcagttgtaagggtttgagggataccaaatcgataaattatatgttcttgaacaaattgtacagcgtccccagaatcaactttcttcaaaggaatcgcctctacccacttggtgaaatagtcgatcgccaccaatataaacttatgtcctttactcgatggtggattaatcatgccgatcatatcaatcccccaacctctaaatggccatggtttaatgataggattcatagtcgacgccggagctcactgaattgccccaaatttctggcaatcttgacaccctttgtagtatctgaaacaatcttccagcattgttggccaaaaataccctgcacgccgacgcaaccacttcatcttatgagccgattgatgagtaccacaaattccctcatgaacttcgcctattgcaactttagcctgatcagcactcaaacacttaagtaacaccccatcaatcgtccgataatagagctcatcatccaataaagtatacttcaacgcctgatatcttaatttccgagacgccgattgagatggattctgtaaatattgatgcacaccatacctccaatcattggctgttattgctgcgacttcgaccttaacatctttgatcatcgacttataccccgatgccccttgggccaaatcattagcttcaatattttgttctcaagatacatgcttcaatgtaaccagccaaaattccttcatcagttcttggcacttctcattataaaccattaatgtatcatttttgcattcatattctcctgccaattgactgattaccagcaaagaattccctatgatttcaatagcatcggcttcaacttccttgagtaactgcaatcctttgagcactgccttatactcagcttgattattggtcacataaggtttgatagtataagcaaattcaaaacttgccccctaggggaaataataaccaagccgatgccacaaccatgagtgcacactgacccaccaaacaataaagtccatggcacaacctcaaccaagccgattgaatcatctcgatgctctacaataaaatcggctatagcttgtcctttaatcgccttcggcgactcataccgataatcaaactcagttaaggaaaatatccactttccaacccttcctttcaaaatcggggccgataacatgtatttgacaacatcggccttgcatatgacagtgcattcattggacaatagataatgccttaacctcgtacatgaaaaatacaagcacaagcataacttctccacaggggaatatctagtttctgcatccaagagccgacgacttaagtagaatacaactctttctttcccttaaagctctttaatcaagactgagccgattgacttctcactagccgatagatataatctaaaaggtattcccttctgcggaggaatcaaaacaggaggagagctaagatattccttaatactatctaaagccttctgttgctctgcccccccccaagtaaactgctgaccggctttcaatctcaacaatggtgtaaaaggctctaacctaccagacaaattagaaatgaactttctaacaaaattatcttggcgatcatctcttgcaattccgtctttgttctccggaggctgaatcttcttgatcgcattaacactcctttgggttacctcaattcccctctcatgaacaagaaatcccaaaaactggccagccgatacgccaaaagcacactttgtcgggttcatcttcaagccatatttcctggttctctcaaaaaccatcctcaaatcggctatgtggtcctctatctctttagacttaacaaccacatcatcaatgtagacctcaaccaaccagacgattagatcatgatatatataattcatggctctctgatatgtagcctcagcactctttaagccgaaagtcattacaacccattcaaacaagccgattgcaccaggacacctaaaagctgtcttatggatatcttcttcggccataaagatttgattgtatcctgcattaccacccataaaactcaaaatcttatgccccgaggcagcatcaaccagctgatcggccactggcattgggtattcgtcttttggggtacccttattcaagtttcggaaatcaatgcacaccttgaccttgtcgttcttcttgataacaggaactatactagaaacccattcagcatatcggcaaggacgaataaaaccagcatcatataatcgcttaatctcatccttgacaggttcaagcatatcggctttacatcttctcggaggttgttggtgtggcctaacccctggtttgataggtagccgatgttcaacaatcgatcgactgagtccaggcatctcataatactcccaagcgaagcaatctctgaattctttcaacagttctatcaacttgattctaaattctgcagataaattcttagtaataaatgtcggccttggtcgatcacctggacctatatcaatttcttccaaatcatcggccgacataaaaccctgtccttgcttgtcatcgagatcatctactgtgtccttgttgtagacatttgaaccctccacgacgccctcaaaataatagcttgggttttccatcttcaattggttgtatatcagaatcggacacttttagaaaatctccatcccaaacttttccagataaacaatcaagaccatccatcttccaaagagctaaatcggcactagcaacattgactgacctgtcggctggcacgatttcaatcttgtcgccttgccactgaatcaagcattgatgcatggttgaaggaatacaacaattggcatgaatccaatcccttccaagcaacaagcagtaagaacccttcccatcgatgacaaagaatattgtagggatggttttgttgccgactattagttccacattcaaaactcctttggtttctgatggattgccaccaaagtgcttgagcaccatgtttgtcttgatgagatcctcagcgtttctgcccaatttcctatatgtagcataaggcatcaaatttactgcagccccaccatcgaccatcatcttggacatcggcttcccattgacataaccatttatatataatcgattctccgtcccctctgtcgtctcgaaaactgcctgctctggtgacaaaattaatttagccgattcctcttcaacttcatcgacatcggcttgcttgaccccaaattcggcaggcaacgtgaaaaccatgttaaccgatgcagtcacaacactttttcccttagccaatctttttgcttcatcggccgtggcctcatcggctacaggagcttgattcttaacatgccactcctgcttcggctttgttttcttcagccgatgattgatttcctgctcgacttcctgaaagcactccctgttcctcaatctttgaacccttcttttctgattctttgtaaagataccagaaggagaccattgagttttcctattttcattttcctcctggctacaatcttgattcactggacctaatctttgatgaacaggaactcttgtttgccttagccgattgcccctactacaagatcggcttgagctctccacaatatcaccgcacctaggacagtcttcaatagacggcagcctcataccctcattccaacaaaatctaaagaactcacaaccccaatgaggatcaaagccatcaccatcctcttcataatgcttttcctgctgtttgtcatacttcttctgatatttgttaataatcttagccgaattcacctgaaaacctcttgcacgacccccatcggctgtttggccaactgtatgcaccatattgacaagaaaaggattaccatcaaccttcatcggcctcttagaatcgtcaaacttgattttgcctccttcaatagctgcctggatctgctgcctgaagaccttgcaatcattagtagtatgagacccagaattatgccacttgcaataccttttcttgcccaattcttcggccgatggaattgtgtgaccagcaggaagttgaatctgcttctctcggagtagcaagtcaaaaatcttgttagccttggtgatatcaaagtcatacctttctttttttctagaattcttcacccattggcatggtataatctttttgctccttacccattcggctgcagctatctcagaatcatcatcttcatcatccgatccatatatataaagacagacatgattaacctttctataattcttcctagcctctgcaaacctttgttcatgcaaggttaccttctgtgtaagatgcgacaagctttcgaagtcttcagatgagaatttctccctgattggagcaatcataccctgaaatgccaaatcggctaactgggcatcagtcaaacttaagctgtagcacttattcctcatttctctgaacctctgaatatacgcatgcacaggctcatcatgtctctgcttgattgctgttaaatcggataatttcatctcatgtaccccactatagaaatatctgtgaaaatgtttctcccaaccggcccaactgttaatcgacccatatggcaaagaagaaaaccaagtgaaagctgatccagacaaagacaaccggaacaacctaaccctcaaggcatccacagccgatgcttcaccacactgagctaagaatcggctaacaagtttgtatgttgaagtactatcttgtcttgagaattttgaaaaatctggaactttgaaccgattaggtagaggaacactctcaaaccattcagggtaaggttgtcgatacaaatttccagcatctttcggcctaagcccaaactgctccttcatgacatccgcaatcatatcggtccatggtcgttgctgaggtgttccttgaggttgctgtgtcatgggctcgaattgattgtattgaggaacaaactggggttgagccgatcctgcctactggtattgaacttgcggggatggcggctgatactgataactcaaattgcccccctggtaattctgaaggtccggctgaatattgcgcaccaaatgctcaggaataacctgaggtattgaggtatcaccgtgccatccggttgcacgtgatgaaccaagtgctctgggacgacctgatttgcagcatgctgcacaagctgaccatcaggtgtcgcaaacccagctgatgcattcattaagccttgctgctgaatcgactgaacaacctgttgccttaatggcgtctattgaattggctgcaaaacctaccatctctgaagcgtctgctgaactggttgtacgacctgttggattgggggtgttttttgggtcggctgcacaacctgctgccttggtggcgtttgctgaatcagctactgctgggttggatcagcagtgtgttggggagataagaacgtagacgcaacctggtcttgcgttagccgattcacattctgtccgctgtgctgtggttgttctctcaccagcaaccgaggattaactaattggcctggcgccgatgacggtgcagcaggtgcatgagccggtattggtgccgtcggctgagccgatggtgcattgagagggattgactggacaactggttgattgtcagtgattaatggcctataatttgggaacactcctcctagtatataaactggtcctgtagctttatactcagccattgaaccatcaaccattgatttcaccatgtttgccaaagtattggttaatattccagattgattgatcaaagcatggtgtacagcatagtcaacctgatcttggaagttgttgaactgcaactgtgttgtattgctgtcttgattaacacctccaccttgaactccctgagcaccatcaccttgaactccctgtactccttgagagttgtcaccttgatttccttgagaaccatttgtagcacctttatcactcggttgagccgagccatctagagcttgtttcacctctccatccttagaagaaccagtcccaggaacatcagcgacaacctttaccttatacttctgcaccactattcccttgcgagtttgcataaatgagcttaaaaactggttccgtgcttgctgcatcatcacttcaaaatccttcttttgatcaggtgcagcttgtctggagtgatggtcacaatgttgccttcattaacctcggataggcccaactgctagatcttctctttaacagaacctgggctagccgaggatggtgatgctagtggcttttcctccatggagaaaaaccgctgctgcgatgctgacttcttatcaggtcacaccaggcgtgccaaaagcgtgttgatgaaaaacacgaggcctaggagatcttcttaactccagtgcaggtccaaaactcgcctttgggtatgctagcgtgccagttgatttggtcctgtaatcaacaagaaataaagacaaaaaaaccgtagttaaatccataaatgatagccgatcggctaggtgccgatgacgtatcatttatctttgagccgatgtcatatgtaaatcgatcggcaattataaatagataataaagaactaaatctactcgatcggctgtagatattaacaatatataatcctggtgtcgatatatacttaaatcaagtgattgggatagatcggtcaccgtgccgagacagtataaatcacttagatcgaaatatatattaacaacaagactatatatgttcatagcatagccgatcagatagatctagcatgtatcggctaatactccaatacgactctatgttaagatattaaaacaaacagaatgtaccaaacagaagcttaatatacttagatgcaataagatcttgacataaagggcagatttaacatgtcaataaaacatatagagcaaatgtagttaaatcagataagatcagctgaaatcccgatactaccctaatcggcaaccagaaggcaggttagagattgatattccaagcacgacttaatagatcaaactcaactaatgcggcattaagtatgaaaagaagaacaatatctagataatcaagccgccggaagtttcatagagtggtggatatcttatataatctaaatcaacatcgatatttaacctaattggctgccctctactgacagatgttagtcgattgtaggttaaatagcgatattgctagagattatggaacatatatgataactcggtggatttacataaacaagattagagtatcataagatggaagaactaatcccgagaacacatgccgtcataacaagttttacctcttgttgaagatcgaaaccgatgcagctcaacccaaaaacaagaacttgtcgaaataaaactaaagcaagaagggtggcgatgcaccgagattgtatcgaacgtgtgtgttaattgattacatggggttcggggtctatttgtacccgataattacaaactatgtccatatcggacacgattcttatctctaacaaactctaagataccataagtctttatggtagacttttgcccaaacatatctctaagaaaattacataaaatatcctaattaatagatataattgccttctcaggactctatccatgcatggcaatcatcttgaagcatatcaagtcaacctgatgtcgtacaccaagtcatcttgccggaatcggctgtatcggcttacccagcctgactcggactcagccgatcctaatcgtagccgatttggactccagccgactcttactctgttcccaaatcgatcttcgtcttcgattccacctcgatctaatctccatctccgatgttgatactgccaaatttggttgttaacaggtttatactggtgtcatggttatggatatcatatacctaatagtagtttactaagctcggtagggcccaccatataccaaatctgtcgacgtttgatgtcgcggttccggtatttgcatagtatggggatcgtcggtgctagggtatacgcgagactgaggtaaaagagacggagacgagggtttttatataggttcaggcccctgcattgtcaggtaataaccctacatcctgttggccgaagccggtattgctcttattcacaataatcacaccagtacaatatttggggtagcctatctaactgttgtcgacatagcggtctgaaggtctgactcgtagtcgacaacagggtagccttcctcctcgagttcgtgcccggcgagatcaaagacagcgcaatgtctctcctagtatccggagacaccgtaggggactagctgtgcctatctctgaagtcgatatccgacgtcttgtcttggcgtatgttggctggtatgttgatcttctgtgttgatctattgttttgtattctctatggtgggtgttgattgtccctcctctcctcctagggggccttgtatttatacccataggtgtccccttgtccaagtagaactagggaaaccaatatggatacaatccgagtagtccttgtcatttccatgtagaactctggtcgtctttccttatccggaactccctccatatctgaagtcagttcccgtataagacatggtatgtggtgggtcttgccgagatttagtcaactactattaggtatgtggtatccataaccttgacaaaatcttatacggaatcatacctcgaatatacaaggagttccggataaggaaggatgaatagagttcaatatggaaactatatggactactcggattgtatctatattggtctccctagttctacttggttaagtggacacctatgcgtataaatagaccccctaggaggagggggagaggacacacgaaggcacaacatacatagaccaatacaagccaacacacgccaaaacaagccgccaaatatcgatgtcagagtaagcctagacaagccctagatagtgtctgtggaggccggcaagaaggatctagcgctatctctgatctcgctaagtacggattcgaggagaaaaactaccctgttgctgactacgtgtttgtattctaggccgccaagtcgataacggttagataggttatcccaaacattgtactggtgtggttatgatgaataaagagcaacacatgcttcagacaataggagtagggatattatctgtcaggtaaagggctcaaacctgtataaaaaaccttgtctccatctcttttacttcaatctcgcatatatcctggtaccaatgatccccatactatgcaaaataccgtagtcacggtattgcccgtcgacaactggtatctgttaaattatcttgctagattagattagctaaggtatctaccattctgaaaattagtcagttgctggattgtttactttgtgcacgtgttttgctggggagatacagcaaaggaggagatattctatctgctaattgccctcgaggtgcctcgtcacgtgccttcgctacgcccctattcgttttctttgttttctggggatagcttttcatttcgaaatgcatattctcaaattactcgagatggattgggatacatattcgttaataatatatctagagtatgatttattcatctaagtagagaaatctctaaatagagacacttctttttagagaagggtaaaaatctcggcacggcttagtctgctatttttttttgacagagtggattcggaccgccacttctctgaaagcatggttcttgcctccctctctcccccttccttgggggtcgcccattcattgggtgatcccttgctctcacgttcgagtgtttgctcgtcgtttaggccggtgagtgacatttttgctcattgcctttctttatgttgttgccagcactttcctgggccgagccagaattctttattagaacgtcggcaggcaaagcccgcgaagctgggcgttctgtgtgattatggaggaattgtagtactcgcccccaaaatgcaagccgggatagatgcttaaagaaagggggagcagtgggccttcaaaaaggagcgagggagtgatgggtaaccttagtctatatgttgctcgtgagcccccaagtaccagtctcgcaacactactggcgttaaaggatcggtccttcacttgcgggtcgttcgcgagtcgaactcgctctcttgccaccaattcatggaccattctctttgattctttttcaccgacggtcatagtgctttcaggcgatatagcaaaacagccataaagactgttcattgtcattttatgaatgaattctaaggcgtaaagatagccgagaccgaggataggtgccgatctgttttacgggcagtaagtaccgttgttcgaaaggaaaggttggcattgcctaaaccaaggataggtttgaccctagctcattcttcaacaggcacgcggtcagagatcactttccccatggttctgtttctgtgcaagcaactattgccttacttgaggatgagttttccccttgctttgcaacaaccaaattcccttttcttccaagcaagacctattccttttcaaattcgtacttctgcaaagctttagggtttagagaaagggtctttcttaccctggatttatttctattcctatttagctgggcaattctagtttttgttatgatgatctcatggatagtagtatttagttcttcttttacattcagattggtagggggaagtaagcttggagggttttaccagtgtgcggcatttaacaacatttgtatgtcgttccaactttccaaaaaacccagtctcgcagagcagcaagagcttgattgctaggcgggtcggtagaatctatggaccgaaggtcctttactgatattttaaaaattggaatccttaatcgaatgcaaaattatgcttcgcgactctgtactcataatccaaatctaatttgttttttggatgcaattttaattagtcttcgggtacaaatcgccagaatgccgccatagcatgcatccatacagcatgtgctagagcgacacgtgggagaatgagaacccaatcgtagctcaatcaaggtttctttacatactttgagttgcatcaaccctactcttgtctagaactctaaaaactaatctggaattgattaaaaataaggatagcatcggagtttcaaccgatcttacctgatacagttgaatttatcttttaacttgtttgataattgtatctaccacttatataagagaattgtctttttaaatatatcaagcatgattcaatctagctcagatcatcatatctgaggattggggcatatttggtgcatttgatttgatcaacacttttatataagtttgtattagagtaatacattgctctaaatattgggtcatcggttgatttttccaatattgattaaactacatgattaatattatagccaatgaatcatatttagggttttgctctttttaatccatcatacaagagctgattcgatctgattgcattggcttaattcttgacgatacgacatcggcttactagccgatcgactattgttcatctaactttgcttcttgtttttcttgctggctgtagaattaaaccagttggcacgctctcaacccgaaagtaattaagatttggacctgcattagagtaaagcaaatctcttagaccagtatgtgtttttttcatcaacagacacctttatatgcgccagttgctctaaatgacacatataagatatttcgcattcatcttgagcatcttataaaaaaattggcacctataaatatctgtgtcagattgttttaaagaaccatcacatattgagctgagccaagcatggatgggaggaaaagaaaatatctccccgattcttctcgtcaactcctttatctccctctccgcctctcccagggccggctttggagcagggccataagggcgatggcctagggcccagccaaaatcggagccccgatccaggtatatatcctgtataggtatttagcccaatagcttagaattgatccttctcactgattagaattgatgatccaatccatcgatccttctcactgattagaattgatctgttcttctaatttatttttgttccccattaaattaccttgattagagacttagggtgctaccgttttgggttcaaccgttaaaggaatcaatacaagtatacaaccatttagtgcaccataagtccataagttaattaaattaaggtatatggtggattagttttcattaggcctaggcccttgattatatagatttttccctcactgattttaggtcatagtactttgtaacgggttctacttccagcccgtcacaggtgactagttacctgtgacgggtcgtaaccggatgacccatcagaagtgaggttactcacctcaaacggatttaagcactaacccgtccggtgagttgtgccactatatacccaaaccgaaggagatatttcttcttccggcggtgcccactcccggaggagataaggccgacttctctctctctctccatttctttcgatttctccacttctctctctctccctttctctctgtgtgcagcggcggcctggcagggacagaggggagcgtgcggcggcccagcggcggcggcgccctcccctccaccagatctaacaggagcaggaggagaggcacggtcatggcgaacggtgtggaggtgcaacgccggtgaccacaagccggctagggctccaagtttggacaacccgagctcggggggctgtggatctagctgtcccgagtttgggtactccagatccagtggcctccggcgccaacagcgccagatccaggctcatggtgagtggatggcgtctcctctctcctccaatcggctgtgtgcgctgccgtccgccgtcaaggcctatcggctgtacggcgagcatgtgcttctcctcatcctgtgcagtcaccacctaccggctacattagctagacatctttggaggtgagcttctgtgttatcctcttttttctttctttgcatggctaaatttgttgtctgtaggaatgtatccacgcttaaataaggttgctgcttctattttagttgagttgagcattaaataagctgctagtcagtttgtcatactctgatcctctgaatgatgtgtagattcctattgcgctgaagtgatatatctgaatctgtttgtcaaatacagcaaacctatgtgcatgatctaaaatgttcttgcagaactgatttgactattctattcaggttctcatgacaaatagtacctttctggatctgatatgtttcgatgtatttttcagctgcttctccagttgctgcagctctttgagattcagagattcaagatcctctcccatgagatggctgcaggaattacagaaaatcaattttgctgcaagatcctcttctcccataaggtggtgtacaagtttgctgcaatccttttgcttatccacatgccttcttgaatttagtagattgacgatcataaattgttttgtgccgtgtatctcattatatgtgcataggtcctggaagagttgttgaaaaatatatctctgttgtctcagatagaatacatgatctctattgttccataggttgcacgtactatggattacctagctaatatcttccactcctattctcctttgcttatctttagttattcatcttatttaattctgcaaattgttctcatatcaaactaattcagtgccatctttttgcttgcaggtaaataggtgctccatagactatggagttgctgacatagcagataattgaatgactctgcttttctaagtgcaagccattgtgttctttgagttttatattaattctcgaacttgatgatgttggcctggtagcatgtctctatatttgaaaactcaaaagagctcttttctgatatggcatcattactttctaatttttgaatttgtaatttctttttctatgagcaattttggcagtacgaatgtaagagacatggtcctaattcttgtttgtctggagaatgggaattggttgaaaaaaagaagctacaaatgtttaacaattgctttgcttaagctgttaatcatccttctgattgcaggtcacgccgcgcttatacttctagtttgatgaacatttgatctattaacttcttgttgattttcggtgacaacttggaatgcatgtgtgatgttagtttgaatgcatgtgactattctattcttttagagggcatgggaggctagccaatctttagaaacttttttctacatgttgctcatcaccgacggttgatattgcaaaagccgtcacttgtgatgtcacctgtgacggctctgcacatacatgccgtcacaagaaagtcacctgtgacggtttttactctccgacccgtcacaaatgagttacctatgacgggttgtaacatgccatgggttagcggagacacttacctttaacgggccatagagttcttgtccgtcagaggtgactgttaccagtgacggtcctccgtcaaaggtgactggtcctcactagtgaccactaatctgttaccaagcccaaacctgtcaatggtgagggtttggagccatcagaggtaacctaatccggtgtagtgttggtttggagccatcagaggtaacctaatccggtgtagtgttttaagttgtcaatcatactatcgatattatttatcgagaacaaattactatattgcaatttgcaaactgcttgatttattatttaccatgttagaaatgtttatttatatcactatagtataggtgctttatagagtatatattataagttaaaagaaatagccttaattcttaagggcctatagtgtgaagttcgcctagagccctcgaaaatgttgagccagccctggcctctcctctcttctccccaccactcgagcaatcttgttgatcagattccttattactattgatggattcaccggattgtgcatatttgcatcgtgggaagtgcgatctcaagcatgcacatgtttctttagattgttctttcacttgatcagcatcggctatcactgctacccatgatggtgatagctatacatgcagccatgtaggacgaccaagggtgacggtggtaatatatatggcatttgcgtggtcaccatcctagggcgtactcgttacgccattcatgcataatagggccttgatcggatctaacatgccccacacacaataagaataagactgcccggctcatctggtcatgccgcagcactacaagaaaggaatgcccctagcggccatgcgatttttttggcggtctgaaatcagccgccaagattacactttaatttggcggttcaaacttgccaccaagcataaagaaattttattggcggctattccatagcagacaaagaaatatgtattttgcttggcggttacaagcaaaactgtcaatataaattccaactccctattaccagggtcgcgcacctgcaggtcaaaaatttgagttggccgcctctcagaccacgaaaattcccgctatcctgccaaatcactgatctgccctcatgccatgtcatcaatccgcgcctcctcccgtgatctcaatcccaaccgtccattccctcctcatccaatggcaactgcctccccactccatcctctcgtcccctttcttccccactccatcctcttctcctccaatccccacaccaccggaattgttgaggaggcgtgcttcgaccaaatcgacgagttcaacaacatcgacctcttccgctgtcgccccccccccccccacaacctccgtcgtcccgcgggcgctcgacaccgtggaggagcttctctggttggggagccccacgctagccgcctacgcgcgccaggagatccagttccggcaccttgtgcaggagcacgccgtcgccgccgccgttgcgaggatccgctccatcgaggccaggattaccgcccaccgcgacaccatcacggtgaaggggcaccgccttcgtgccgtccgcgccaacatggtgccaccggttcgggcccggctcgccgtcccgatgggcgccacaggaggaggtggatgctactcgagcggctgaaccgcgcagaggaggaggaggacgccatggaggagcctgaggaggagaagctggaggccatgccgcagctggccagcggcatggaagaccttagcctgttgctccgtgcattcatagccttgtactaataaaaaaaaatttggctagagcttgtgaaagaaaaaataattatttttggtttcaggtatttgtaacaagatgaagttgatctccaaagaactctgaggttaagcgagtgaggacatattgtgtagaaaatacttgtgttggtttgtgagggcagtctatgtcctagaaaagctgctagatgtaagagaggcgggacgtttcagttagtattcttaacggtttcgcagccaccaagttaaagttattcttggcggtggaaaaccgacaaggctatttttcctgacgctttcgaaagatggcaatcttcttaatttgcttggtggtttgaccgccatgaatatttttacttacggttagccgccaataaatttaaatatccttggcactctagacttggtggtagtttcttggtggtcggccgacggaataattatcctaggcggtttatatgctatccttggcggtttttggccgccaaggacattccgtttttttagtgtaggtctacatccgatgaagatctagcataccctacaaggaaacaaaacacaaagaaacagtaaacgagccgaatattaaacgaatttggatggcgtactcagataagaaagatttgagttggtcagaaagcaagttctagatctacaactataacgacgttgtgaatgggattgatatataacttcggcatggaaagttagaaacgacacaggaaagagtgagcatcacgtgtccctagatgtggggatcccattttggtgttttgggaagaaaatgatgtgcataatgtgttgacgctggtgtccgccatgatagccaccactgccatgaactaaggctacctggaaacatcacccagctagaccgcccgatgttcgatgatgacctagaacatcgacagcacaacgggcacgccggcttgtcgccatggcgcagccactcctcgccatgcttccggctatccctcccgccactggttgcgttgagcccacgccccgacagcaaggggataccgcgcattgagtttgttgttgggcggcagggtttgaaatttcggttcgaaatttctgaaatttttgaaatttcggtaatttcacccacctcccccaaccaaaatgctcacatctcgtccgaaacttttgatttttatgaatttggtcaaattttatttaaaaccagtcaaaatttcgcccctcccccctcccccccccaacccgcgacagaaaatctaatttcaaaatttgaaatcctggtgggcggccatgcccgtggggtgcataagatagatgctggatcggaaccacgctgctctgggtggaaatgatcaatcataaccgaagcccatcgcattttcaagaacgcacacgcttgcccattgcgttctgtcccatacgtacccgggcaatttcagagacaggctctgcctacgaactgaacgcacgaatcacagtcgggcagatatgacagacaggaacctaagcaacatcaattttttaagtaggtaaagattgcatataaaatataaattgcagtggcggagctagagcgaaatggagggtgatgccacttgcttaatttactctactttaaatcgagtttaagttaatgctggtgcttaagtttgtattgaaggggtgcatacatggtgaaaatagatgaggtatagctaaaaaattttcttgaccgggttcctgaacaccccctattatccactagctctgcccctgataaattgcatgtataaaaataaaactgacgagttgcatatcaaatccaatgcatctggccttgctactacaaaccggattactcctgatagccacaaaccgttaggaaaaacactattcacataaaggaaaaaaacaattttatggtacttgaggaggtaccatgaggtactaatttttttattgtaaatttgatacctcttaatagctaggtactatgaggtaccatgagaggtaccaaatattagtgtaaaatttggtacctcatgatacctctttaagaaccgtaaaattgcctaaaggaaaatgcttcctaatggggtaccattactccattaggactggcttatcagtcaggaaaattaatcctgacgtggattgccgttagaactattttttgtgacgttatatgcaacatcagataaattctaactttacttctgttctccctaaacattcaaggcaaggtatctttaccgatgaaactataataataataataataataatagcaaggcaaactactataataataataaaagttcaccaacactaccgaagatccatagctatctgtcttgctgctttcaagttaggaggcagcaatctcgcaatgagttcattgagaacaattgggcaactgattttcagatgcttataaccatcagttctcatcatcctctcaagattggttggttgaagcaaggaattcgaggcaagcttccttgagtccttggcagctatgctgctcagctagagccaaagtggtcgccaccatgttgcagtcaatgtgctttgctagcttctcctcgcatatcagcttcagcctcccaacattgtaccaatccgcagcgacaagcaggtgctgagccatcattgcatcttgagaccacgtctctggcagcgagtcattgtacatgaaatgtagcaataatctgaacacaccagcttccatatcttcgatttcaatggtcctaggggtttccgcaatcatggcaccgaagaacaacgccctgaagacagacgaacgagcggcgagtatgcatttgtgtgctctgaatctctccttaccaacgtagatcgtgacgtcttttccattcatcttcttattactcaggaggttgcccaaatgcaggtccagacggcctgcaggaacttccacagacggcttacagtggcttcctttgctagagaagcccttcatgacagtaagatcacacctgatagtaaatgaatcgtctattagatgctccgattgttccaaatcccttttcttgatgaacctggagtagccccagtttgaacctcttctgctgaaattgtgcgtattggagatgaagttgcgcgatcgcaccggtttattattcgtgtccagcagtttgaagctgaactttgccttcacgtcctcggcccagtgagactcaagaaacacagaaaacgacaggtagtctgcgttctttgagcagttgccattggggtagtatctgacgttccagaggaagtccccaacactgaacgggatagatgacacaaattcgccattctccatcagatccttagttactgtgtatccatcaatcttgattacatgtgacgcgctcgtggtttcagtagcaatgacagaggaggaggtgttgttcgtatcgtttgccattgtggagttgaacttgccatgcatcagctatcaacagttcgtgacactttttcctgtgctggagtatatataaacaaagcaattttgtctagttagtactgaaaaaaaacgtaccccctcaataaagtacatgcagaacaacttttcttgaaccaaaacgacacgaaagataaagtagtaaccatctggactagaagacgtataattcaaccagaattgtaagatatttgaaccatgaatgcaatataagttcagttaaaactgaataaatagaaaattagtcttcagtagcaacattgtggggaaaaaaaaagcttgatcaggtctttgtcgagctttcatcagatttaacttttttatgatttgcttattttttatatcattccagattatttttgctaacaaactaacgagcatagcctaggtgaaaacgactttcattcacaattaaataatttttatttaaaaagaaaactagatcagtcggagcaaccaagtcatgggagcaattaattttgaaccgagccaccaagcttaaacgtttctccccctcacgagaagcattatatttgcagctgatgagatgcatgttctagtaaaacatagcactaattctgaaactcaaagcatacgattccaacaaatgatgattggccatgtgtgcccatgtacattcatctcacatgtagacatgtagggctggattgattattcattattaagaaaataaaaggagcccatgtacattcatctccatgtagggctggatttattattcattattaagaaaataaaaggagaaaaacgaatgaagataccgaataacgtgtatacctttgtgaattacgtataagcttccaatgagactttacagatggcggcttacctatagcggacagcggggcggaggcgcggagcacggaggcgaattgcggggatgatcacggcggatcgagcactcgaggagtgaaaagatttggcggcgccggcgtcgatcagttcgggagggcgtacggcgggggaggttgggtttttcaccaccccgatcgatacgtattctctgccgtttggccttgttgatttcacgtaaacggcaaggatatagccacgagcccacgacttcttgattatcttccttgcgtagtatttcccccgtcttttttatctttgctttcctcctgcactattttatcctgaactagtctgcagggtactcctaacggacgggtgatcgctccctccccttccaagcgatcacccgcacctcccctttactactttacctccccttcttctcttactgctacaccatataaatttgaattaaaatttaaatttgaaatgggtatgtaaactttttacttataaactttgggtctataaactaatatttgaattcaaattcaaatttgaaacgggtatgtaaacttttgacctataaactttgggtctataaattaatatttgaatataaattcaaatttgaatcgggtatgtaaacttttgacttataaactttgggtttataaactttaggtgtataaactttagatgtatagaaatactatatatagaaaatatttgaattcagattcaaatttgaacggatataattcaaattcaaatttgaatcgggtatgtaaacttttgacttataaactttgggtctataaactttagttgtataaactttagatgcataaaaatactatatatagaaaatatttgaattcaaattcaaatttgattcccgacataattcaaattcaaatttgaatcgggtatgtaaacttttgacttataaactttgggtctataaacttcagctctataaactttagatgtatagaaatactatatataaaaaatatttgaattcaaattcaaatttgaatcggatatataaacttttgacttataaacttttggtctctaaactttagatgtgtaaacttgaggtgtataaactttagatgtgtaaacttgaggtgtataaactttaggtacataaatttactaaaataggaaagtaatgcggtgccaaaaaggaaaccaggtggagggaggggggaagggggatcgatcgctacccttgtcgccgggcgatcgatcgcccattagcacttccgtaatcacgacagttatgtttaggtcggcctatttgtctttcgacagaaataacccttccaaatcttgcaaatttcacaatataaaacctttttttttcaacaactggattttatttttggaaaaagtacaaattacccccctagctatcgcggtcgatcgaattaccccccttaacccgaaaaccagacatgcattattcaccttcaacttttaatagtagacgaattacccccctcgactcaatctatagcggtttgtcctacgtggcgtatgcgtggcaatccagtcagcacctttttttttttaaaaaaaagatgggacccacctatcatcttcccctcttcttctctttctctctctcttaattgaggcgcggggacgggcagtgagcgtgtggtggtgctcatggacgggcgggcaaacgcgcgcggggaggtggaggggatgggggaggtcgatggggaaggggaggggcggtgggtggcagcgcctgtggatgggcaggcgagcgacgtggacggcggcgagccgagaggtgaaggggatggaggaggttggcgcatggcggcggccatggcaggcgagccaggggcacggtggaaaggcggaggggatgggggaggtcggcacacggcggcggttgccctagcgggcgaggcaagggcgcgccgtgcgtgtcgccgcccaccgtccgtccccgcgctgaccgcccacccccagtgcgccgccgcaaccccgcccattcccgggccgaccgcccctgcgtgtccggatggaggcggcggcggccggggacgaggaagaagcggcgatgcagaacgtggaggcggcgacagtgcgggacagagaggagggagcggcgaactccaggaaggagctccggcgaactccctccggtgcaggagggtctccgtgtccgccgtccacgtccgccctccgcccgcccccgccgccatccatccccatgccgagggggcggctgctcgtcgtggccgcggccatagccgccgccacctcctcgttccttgccgcctctgcgtcacccgctaccaccgctccgtgtccctagcctgccgccgacccgcgagagagaagagagagaggggaagagtgactggtctgccatgtgtacgccacgtaggataaaaccattctggattggtttgagggggataatttgtccgttattaaaagttctgggtgaacgatgtctggttttcgggtttagggggtaatttggttgaccgcgatagttcggagggctaattcgtactccctccatcctcaaaagttacacatattacatatttgagtttttccaaataagttgttcctatttgtagtctttatgcattcaagacttaatgaagagataaattaaatgttttattagaacccaaggagtcatctaaatgcttattggttgcatgcttggattcacttattgattttgtaacatccaaggtgatttaatttctccttggtcttggtgtcaaaagtaatatgtgcaacttttgtggatggagggagtacgttttcctttattttttcatcatgggttaaaaatatccgcacttgtaataacaataagatgttgatgtgaccatggctactatgaatataattgttgttcatatcatggatcaataaaatgacatcatgatcaagtcctccaagtgctggaatccaattcgtccaccttctccgtttttggtccatgtgtacttgatgaaaagctctcacagtcctttttccaacgaatccagtctcatcgccaaattttatctcagtcatccacaatcacagaaacaatgtgttgcgaaacctatgatgggcctatttgcttgtaacttcatctggaaccccgacccaagtgaggcccatgtggggtgcgctccaaccaggtggagtactttgtcgtgtagtcctgtcaaatacatactctcatgtcaatatttcaattcaaaattagcatgtggtctcatctgaggatgatataattaaatgaacacaaaaatgataaaaaaatatttcccctacaaaacaaatacaaataatttgtttcggttgcgcactttatatgtgtatgtagcaaacgattcaattcaacatgcaagagtgaaatggagtgagaaataataatgaaaactaaccttgtatgcttcaagctccaacaagacaaaaaaaaaatagagcaaaacctccctcctcctatagctggtcaagcaagaacaagaggtgccgctctgttcttcgctcgatcagcttgaggggacaggaaagtggtatatattgtgatagtaggtgccggtttttaactagaatcgacacatatctctaacaaaaatataggtgccaatttttaagtgtgggcccttcaatggctactagctaggtggtagagtcaaagttgctggttctagctaagaatggacacctttctatgacagcctcaaaggtgccggttatagggtgggcctcacgaccaacaattctgatgggatgcatgtcaaaggtgttggattttatatggaaccggcacctatctctgacaggaaatataagtattggttctatttaaaaaagcagcacctatttccattggaaggtgacgtggttttttcgtttgacgcccccacgggtacctgtgtggatggaaaaagtactataggtgccgattttagctgtttcggcatctattgtaccgtcctctatgtgcctttcatatattcagatgtattgattggaaggtctatcgtgcttggatgaacttaggtattgcttggctctgaataaatgttatcaaaaaaacccaaaatcaactctaaattgaaggttaaaaatttaaattctggcttataagcataggcataagaaaaagatgaggcttgtaattcggtcatcaatggcttgaaatcagctcctcttacacataggggcgtgagtccctaagatgtggggctcaccttcacggtcccacacattggaggcacatgtccctgcaacgtgcgtcaaaggagcctaatcatagtggcatacatgatattatatgaactaaaaacatgagctgtaatacacagactatagacaaagtcccacatgtcgaagtatgtttgtcatgttctctcaccaacttcaaatcagttttttagggaacactttgcttcccaactctcccttatcgttttccgcgcgtacgcttttcaaactgctattttggtgcgtattttgtaaaaagtttttatacgaaagtcgtttaaaaaatcatattgttccatttttgaaaaaaaatagctaatatttatttaatcacgtgctaatagattgtttcgttttccgtgcggaggagtttggttcccaaccatcccaaacgaactaagagctgtaaatatatactccatcttttactaaagatgaataaaatcgatgctcccatttgaggctcaaaaaaagaaccatcatgtgccaattttcagagcaatttttaccattcaaattcccaaaagaaaaaaaggaaaatgctttaagtacgatcacgagcgtccaactctcgtacgaccacggtgacggcgtatgtgacgtctgcgagctgaccagtttgggctgtgatccgaatctcattctcgttgggccttccaaaagccagtcacaatcgtggctaactaccatgtctgaccgcgttcgtgcaatcagcaacaaacaaatactactaacagattcgcgtgtgcgtggaatcaccgtcttacatgagcttttaatggatcttcttcaggtgctaattttcaattattttcttagtttcttctattcatatcattacattgtacaagtccgttaagacgatttgtttgtatgttacggctgtgacagtataagtgggttttcacatgctattcaaatgcttatggccctcagttaatcatgcatagcttaattgttgacataagcgcaatcaataatgataagctagttataaaaactgatcttggtggttacactatataaaagaataaaaaaaataacttgctttacctagttgtatgaactggtcttggtaacatctgctacactgaaaataatactagaatgttgagatcaagttgacagtgagtggattcagcatttcagattgacctaaagcttcggcagaagcatcatgcggccatgttgacatgatattgtgggtttagacttgtacatgggcctatgtatatgatatgagagtgtatgggcttgtggcacaggtccaatctacagcatcacttcacgccgtcaccgttcgctgttttagttgtacgctagtcgtataacttggtcggacgtatagcagatctcaataatataagtacatgggtttactaatggcctttctttctctcagtaatacttttactcgtaggttgatagtagagctagtaatctttttacccatgggccaatgaagtaaacagaaggaaaaaaacaaaaaaaaaagaaatggggaacggagtgcagacggaaaaaattggattggggaggggtgtgggttttttgtttttggggtgggggtggggggttttggtgggtggggagagtaggtgaggggagcattttagttattgtgcaccgtatgtgcgctttattatgtccctatatttgtatgtatacatacatatatgcatgtattaggaaaaaatatccgttcattgtaatgagtgaagactattttaattttattattgttgtacggtttaactaaggtaaaattcactgtgggaattcgcatgagctgcaattaggatcggagtccgatcatctaaaggtagcatgcatagtttcttaaaagatatttcttatatgtctcccgtatttgtaaaacgaatgaacttaaacaaacaactcaaaaacggatttgtatttccaaatgaaatgaactttaaaaccaactcaaatacggatgacgtaccaaagtactgataaaaacatcttcaatttttataatagtagagatatatatttgtgtgttgaatgtgaatgtttcaaactgaactttgcgagggattttgggagatatatgtattgatggttaatgcattgtccatgtggatgtgtacctgtgtctttgaatgtatcgtgtatgatctgtgattttttatgattctgtgaaatttgtaaggtctactattttttttcataccggcatataggtgacagttgttggtaaaaaccgacccctatagtgctgccacgtgtccagctcaagcgataaccaacaccaatatattcttataggtgtcaaatgttacgtagaaacgacacctttgacaactatcacgcccagaaattcactagtaatttccgaaccaatttgtgcataaaatcctcgtccaggaatcagccaaggtacacaaacagataatttaatatacagattcatcataataataacgttacatacttacaaaagaaaagaaaatagcagcggaattacggtctagcgaagctccggctccactcccacaggcaactcaactggggtataagtcaaacgtcttctccttcgcaacttgtcttcaactgaggtttgattgattattgcaaggtgagcatatgacatacttagcaagccacacagcaaatatgcaagtgcacaaggataccaaagaatggcataatatagggctcatttgcaaaagcagcatttagcaaacatttgagaattgtaaaacagtagagtaattaatcatcaatatttatcaacactgaatagcacatccatactgcacaggcccaaccttcctgaataaccatacccggctgtacagatctatctccaaaccagggatgtgtcattccaaaccaggagctaaattaattaccatcaattaccacattattattaatgagtagtgtaggactaatcacgaaagacattgttagacccgcccataaccgcgggcatggctattcgaatagttttactctagctagaggtgtaccactgtacccacaagacacaactccataatatgtcaccatatcattatgtgcccatgctgaacatgtcaccatttgtgtagttgtgacaagacccctcgcatagctcaactcaaagcagcacacctttcctggatcatagtcaccccctcaaaaaccagaggcatggactctccagcgacccccgtgggcttatctccgccacttctcagtctggcacaccacaatgagctttgctatagaaagtgtccagtcgttgcccattctggcttgtggttggcatggttaatgtttcacaaccgaaacttgtgaaccggtccttaattttcatgagcactatcatcaaaaccatgtgctcacaacccaccattatcaagttttagttggcaaattaattaattaaccaatcacgattgaccatcatgagctatctttgccatgtacatcattaagtaatagtgaaaccttagttatcccaatagtgtgctaatgtttctaagcatgactaagtaattatatctaatatatctaattgaaccaatatataaatccaactagtcaaattataacccgaggtaatcaagaaatagggtaatcaatgcaaattggccataacaaaggaataggttcacaccacccgatgacattcgaaaaaaaatgcacagttgaaataaatagagaatttaaatataggatcaacatgctcaaaggaattatgtttgggatctgtgtgacttgacttgcaataatgggtcttcaatttgtcttctggaacacttccgacacactcgcgaaccttcacaatgacggaaacgacaagctaacacgcaaaacgaggaaaaagactaagaaactccaaataaacaatacatataaagtaaacaaacatgtagatcataattttagatgaattatgagacttgaatggcctcattctgacttcatatgaattaattacgaattgtacaagatttaatctaattaaagcccatttaaaaaggattaaataaatttaacacaatttatggataattttaatatatagatctttattttatacaacttttgcaacttgaaccacattaaaccgagttacaatgaattagttatgcatttctaaagattaaaccgcattaaagcatttatatggattttaaattgaattatgacgcaataaagaattatttttgaaaaggaaaatagatttattgcatcatcaaagacggtccatggtaaaccgggttcacagaagcggtccacggaaccaacggccaagatctaattgacctaaaattgactgaatcgaacggccgagatcgatccggtctaccacgggtctacggctgacaaagtgctaacatcagcgatgatgtcatctccggcggcggctcggcacctcgtgctcgccggcgaacgacggcacggcggcgcaaacggagggcaccaacgcgtagagctcggctcagcgaactcaccagtggcttggacgacggcaaacgacgatggatgacgacggcggtcttcgggtcggcggtgacggcggtgcttcggtgggaaacggcggcaacgaaggggtggacgaggtgctgctcctcctcgtgatcccgacggtggcgacgacgaccgaaggcggtggctgcaacggtggcacggcacggctggaccgacggcgacggtggagagcttcgggtcgacagtgtcggctgcgcttcggtgatctgcggcggaaacggaagacgggacgaggacggcgatgacctcgcgatgctgatgaaggagacggcgtccgacgacgacaatcgaagggacggcggcgcccgactggacacccgccggcggcgacgacgcaaagagccacacagaggcggcgctagagaaggcggcagtcaaaggtggagatggtgatgtggagaggaggtcccggaggtccttttataggggctagggggcggcgatggaggcccatggccggcggcaaggagatggaaggtctagggttttggaaagagaagctaaccaaatcggcattgaatccgatgatttccaaacgaattaggtcgggattcctaaagagaaaaggaagaggagatcgaggagattatttcccctcaattgatttggccggagaaggaaaggggcggccggattttggaaggaggcggcggcttgcggcgcggctaaatgcggccggaggttgaagacgactgacaggtgagtcccacctgtcagcaaaaggaagagaggagggaggggcgcggcggtctgggccggcttgggccgggcgcgagcaggctgaaaggagggtgagagagacttgggctgactttcggcccaaagctaaaagagagatttaaaacctttttatatttaaattattcatgaaatgatattccattgattaaaaatacttccttggctcaaataaatcccagaaaaatctaggaactatagaaacaagagaagtatttaacaaaattttatctagcccacttttatattgagatttaacaaattaaaattagatcttctcttttaggcttttaagatcatttctaataattccttttaaaccacaatttataatttaaggatttttaaacgagaaaagcatttaacataattataactagatcattaatgattattgattaactaattattgaactgttctttgtatcatttaggaattgagctctgaaaaatctgagaaaatttcaaagagtataattaatcatggagaatttaataaaaattaaatccagccatgctttatatttaggaaattttatttcccacatttaacttcacttgtaaattaatgaacatttaatataaattctattaataatttattaagtaatttataaatcctgaaacgaaaatcaggctgtgacaacaaccaccacatggcgcttgggggccaagaactggcacctataacaatatataggtgtcggttcatggttacaactgtctatatgctataggtgctagtcgatggcttttgtcatcggtgccacctgaggggtgtcggctagaaaacccggcacctatgggggtttcgcaaccagcatcaatacaattttttttagtaacattgaacatcgtgctatgaggagttaatcggttcgagtgttcaaaacttaacatgtcaaataatggttggattatccgcatatctggtataagtacaaaatggctttgataaataagagattgcagagacaattgttttttttttgagaagtaagcgatattttcattttccaatttcctggaattcccccataatggaacataactagaaaatcgatgtgcccgttggcgcgtgcaatatttatatcctgtaatattaattaatgggttttaaaatttaggtttaaaatacacgatgaacaaaactataacagatctattggtatataacacaaacatgctatttatgttctcttgtcaagtaagaatacataagattttacatgaataaactcatttcgtgttaattgtttatagaaaacttacaatccacaaaactcttaaatatttttttcttaattttgtgttagtaaaagactgcagaaagagtagtaacatacgctagctaggttttattgggtgaataagtaaattgtttttaatgaaattgcacgttttgtatttaagcactttgaacatatctttttttttctttttggaaaaatgcacgttcattttctcttttcagggagaaatacatataccaatatgaactcattctaggattaattgcgttctgcaagaatacctaacgatacacacaattcgtgatagcacttttctaaagtatatatgctataaccttaaccatatgcttaaaacatagtaatactaatcttggtctatttaataactgaaaattacatatgtatgtgctatgaattactcgaatacatttaaattcacttcttaactttaaaattgttttgtctatttttattacttataggcacttttttataaaacggataaagtttaatactactcatgatttcagcacatgccgtatattttaaacctatattaagatgtcagtgtaatgtatagtgacgctgagttacttttacatgtctaatttgtgccacgttaggtgcactgagacattttagtttagcattatcagggtagcactgaggtcacgatctatttttgaaattagtttttgacacggtttattattaaaataatttttatagaaggattaatttgtcaaaattatgccgtaaacataagtatccaaataaatgcgtatagtgatagaccaatcttttcatcttttctttcttcctacgtgggtctacctagtccatttaatcatgtgtggcacctggctaatgatgctgcatgagccatgcgcaaccgtgtacaggcggcgttaagctagctcgggctcgctcactcgtacatgttgatatttcttacggtcacagatgaaatccgcaagcgcacgaagatatcgaattttaatagggaacatgtgtgttcagctcctcttcatccaaggacacaaagcaaaaataggcaaagggtagagaggatttcctagtgaggaacattgtctatagaaagtttattcaattctatcgcaatacttcaggcactagcttgctcactgctaccagaacgcactatactccgtacccgaacaagaaggactgcagtgatctcaagggctgtcaccacctctacaccaacttctaacgaactgtgggatacgcaacaatcaccggtaattaacaaccttaacatcgcatctatgcaattaattactactctagcgttatctaaacactaaagtaatcattatctattaattgacaaatagtgaacaatgatccaggaactaagagataatcctcagaaagcaaatctcaattactcgataaagataatatcaattaaagctgagtacttgacaaggtacacaaagtaaagaggaaagtaccgacaactctggaattcctctgactctttcttctttaatttctccctattctaatgtaaaaaaagatgcaatagagcctcttataattcagctcatgctttggtgtgtattgaaatgaagcatgtgagctccttttatagccttcatatgacggtttggcagttggaaatgtcccaactacctctccaccgtcattaggaggctatctagatcgtccacgtggaagaagatggcgaacagcaccaatgtcggttcgaccaaaccatggctggcccatttgacccagccttttctcctgggctctggtggagaatccctcaacccatatgtttggtgaatgggcccatttgaacgtgtttcgttaggtttgtggcccccaaaactccataggcttgaatatgagtttgattatcttccttctttatgtatatttcttctcaactctagtagtttgtcacctgcatctaaatatacgccaacacttgtggattttgttagaaataaaccctactactatgttggatattttatattatatttcagttttatgcaggtattgacggcgtgaatttggtatttaacagccgccaatagtacatgcgtcaaaaaatagggttgtgccacctgtaccaacaggcagctggtagaacatccaacatgagaataatagataggaaaataaagcatataagttacatgacatgacagcgtatacatcatagagtttccacaaagacattggtagcttttttttacaacttataaggcaaagacagtaagtgcaagcaacaaaaaaataatattagggcaaaacatgttgtacttctattcttagctgtctacttaaagctaaggctgaaaaatagaaaacaaccaaaaaaggcccaactaattctactattgctatataagctctaaaatctaaattctaattaatagaaggggaccttgaatatcttctgatctttcgaaaccccacaaataaatccacctgcaggtggatgcactatgccactgttgggcggacaagctatacatagattgttgtcgatgtcaccatctacaaaagggaaatttgataaaaacaaatttataaaatgatggaattatgacatgaaacattaacatcagattaaaaaggaagaaatggcataccaactttggtgcaagaaagcacatggtagatgaatccaccattaatgataagctcaacaaaaaaccgttgttgtgtggagtgttcccccgtagaatcgtttaaacgtttacatcccaagatgttacagtgataccaacggcgcttctcaaacatcataggatacaagaccaagttgtttggaaccatatcatactctgacgactaaagaaaatataataattagtactagcactttagaagtcagaattttgaatgtaacatatgcataaaccagaaatgagttggcatattgtatgggaggaacaaattgtaacacaattctactagccttataataacttccagaaaggtcgttggatatcccatttatgtaattgaatggtttccacttgccagtagttcccacgaggccacaaacactaatttttaaactaagatccacaaattcttctggtttataccttaattaaataaaaaatttatgacgaatatttggttccaattgacaactatgactgcaagcacatccaacactgattattattcaaatttgtttcaaattagataagaaccgtctggtctttcttttattttattcagtggagctagcaccaccattaggagaattttttctggaattattttcttggaccttgtcttctgataagtcataactagatgaaacacactaaaaatcctaaggaacataataggacatactctatccagaagaaatagttccccaaaaagttttatggacttcaagcaatgatattgccccagatgaactaaataatgtggcttctcttttacctttgctagttcaccaaattaaagcatgtcaaaagaagttgacttttgaatggttaaatgctattaaatgcaaatttatgtagtagcatctggtaaaaagaaatgtaatagcttaacattttctcgacttatttataataatattatcttatgacttgtgtctttccatgcgcaaatgactctgaataatttgacatgcatgtgtagaagaatttaaattagtttgcagttgcataaattctctaactatggtcaactggtcaaagagcatcaattgcatatacatgttggtagttgcattgtgggtaaatcaggtaagagcactatcacaaagtgaatgcaatatgtaatccgatcgatcttttgggaatgctatatccgtttttcttttttactccaatattatattacattgattttattattgacaaaggaaatgataaaaattcaagaaaggtatcccaagcactaactaaatgcattaccatgttttgagctctcatgtaaaccatagaagcattccagatgcccttttccctgtcatcagcatcatccacaggtctagcatcgaagagtaatcataattagcaaagtgtaaactatatcgaattggcagttacactaattaattaaacatgcatggaactttaaactatagaatacataatcttatgaattattgtcagcttgtttaagaaaaaaaaagtaatgcaaatgctataaattgtatgagcattgcatatttcatatgtatgatggtttttatagttagctctactagagcagtgcccattgcccatgaccagcaatagtttccaaattaacacaatagtatcactgaccttatcctaaatacgtcggccaagatatagttattatcgtcaatgtctcattgttgcaactatggcttataagtaagccaagaaaaataaacaaagcaaccaatttttgattatatagtaagacttttatactttacaaaaagcaaaccaaataatatcataccaaccagcccggctttgttagaacacttattattgacatactaccaaattcatacttccttgtattctatgacagaaagtaatactatagctagctagagtaaacatgattaatagcatatgtaaatgaaacgagaggtttatgaacccaaatcaataaaagcaagaacttagaaagaaaggatcaggatacgtacatctgtccgagaatgaaagcgaacatatcgacgtcgggggtgtttctcctatcaacatagagcacgtgtctgggatctccgtgggcgtagggacaccagtcgggatctgggacggacctgcccttctcgtcgacggtgaaggggtggccgagttttctcaacaacgcatcgaaccagtcctccccatcctcctcctcctccttgacaagatccacaggctctgagcgcttactgctgctgctattacctcgcacgcgctccatctccttcgtctgctcggcttcttccgcaacaacaacagcctcctgtctctcgtcagacatgcgcgtgcttggagccttcgctgtgtgatccccttcagattcagaaaaagccagatataataggcaaattcgtgcgacggtgcgagagccagagagcgaagtcggctcggatttcgtctccgattagaatctgatgcgtattgggccgggctgtggactactactactttttttttcgatagggccctttcgccgttttctagtgaaaccgatccgttcgtgcacgccttctctcaagaatcaaagatctgaacacggggctggactgctggagtagatgtgtacgttttggattggataaggttttaaatcagacccacttgttatggctcttgacaatagcgcacagataattctactctctaagttttaagtttcatattatataagacgtttgactttttctctagtcaaacttcatttaattaattcgatcaaatttatagaaaaatatattaatgttttgaacccaaaacaaatatattgttaaaatatattcaatgttagatttaacgaactaattaataaatgttgctagatttttctataaacttagtcaaacataacaaaatttgtttatgaaaaaaagttaaacgacttaaaatacgaaatagagggagtaataatcatgaattcggtttagagaaaatataggatgggatggtcccgggcccgttggtaacttgggatgattttcgtatcatgtttggttatggggatcaaccatcattttgggggttggagatacagagatggagcactgaggcatcttactcccgtttttcgtgttttttaattttcctgaactcgaaaattcacatccgtgtttatttacctaaaataacttaataaaatctttgtaattggaaaaggtttaattttactaaataaataaataaattatgtcgccttttagtttatcgttgattaattggagttaacctttaagataaattaattaaggattttaggattaaaacaaacctcactgtgcttggccatgggaaacgctgcccacgtgcatgcatcaacggagcacaagaaaatgaagagagtagcaacatccaggtaattctagaaacatccgcgcgaaaagaaaatgataaatgttaaagaaaaggtaccctgattccaaggtcgacttattcaatccatttttatcttcttcaataagatgaatctagaatttttcaataagaaagaaaatccagaaaaaaattgtgaagatgccaaaaataataaagcttccctcctcttcacaacagtcatcctctccttcactggtatccttcactgatagagaaatcatctttactcccggtttataacccctgtagtcccagggcttaagtcccgggtgaaataatcgagagtaaacatcgatctttaatcccagttggtaaccaaccgggactaaagagagggatctttagtcccggttaatgctaccaaccgagactaaagagaggataggggcagtcccggttggtccattttctttttattttctcccaaatcaagtgggatgtatatacccagatcaaacaacaaatccccaaatcgagtgtcatgcatatatctaaatcaaaccctaaatccccaaattcaaagtaacatcacaaatcattcacatcacaaatacaaatcctatgttacttacacacaaatcaaatacatcacaaatcttaaaaaaattacacacaaatcaaatacatcacagatcggttatagaaagtatacatctctcaatcacaaattataaaaaaaaggaaaggagagccggcgcgctgccgctccatgcgcggccccgccgtccgcgccgcgcgctgccccaccgcccgtcgcgcgctgtgcctcgccgcccggccaccgcgtgagggcgcgcgaggccacctccgtcgccgcccggccaccgtgtgagggcgcctccgcgcttcccggccgcgcgaggccgcctccgcggtcgcccggccgccgccgcctgagaagtggggaggagacgggagggggcggatccagaggaggttgagaagttgggaggagaggggaggaggcggatccagaagaggtagaggaagagatgggaggaggaagaggaagagatggggtgagtgaggagaggaggagataaaggtcagagcttattaactgatcctcccgtgcgcctcggtcctctcgatctcgcaccacgcatgtcgatcttttttttcggttggtaacaccaaccgagactaaaaatagatctttagtcccggttggtgtcaccaaccgtgactaaagataacggaggggtctgacaccacctgctgtcttttaaaccgggactaaaaatgatctttagtcctggttgatgttaccaactgggactaaagatcaaaaaagtagctctaaccttttgaaccgggactaaagatgtcccagtttttagtggaaccgggactattgtggatttcggccgaccgaccaaagatggtttctccaccagtgcttccatgtttgcatccggtccattggtcatagatctgatgtcaacatgccattatcactgccaccggtgagctacaatcacttccggctgacgaagaaggagaggtgggtagctcgggttgacggtgaggatggaggtccggtgcttgctgatcttggtgaaggcgtggacgaggaagatctcaatgaggcgaggctggcggcagcgacggcgttgcgggatggcactccggtgaggttggatgcgctgttggaggaagaagacgatggcgtcttcactggtcactggcgaggacactcctccggcgggcttatataagccactagggagaaggaacggcgctaggcagggagatcggcaccggcgaagtgggaaaccagccattgaaggcagagaggaaacaggcgtctcccacggtgattaaaggctcgatcgaatgcaattcaagaggggaaataatgcccacaatgtaaggaaacaattttggcaattaatttgtggaggaaacgtgcggggagggaaatcaagagggcggcggcgctagggttcttcgctcgagaagaggagcggtctggggtgctgatgggcggataaccgtgcgccgtgcgtggtgcgcgctagacgacaacaaatcacccctatatctcttttgtacgtatatatgtatgtgtatgctatacatacttatgaataaaatttgtatatgtatgtatatagtatatacaaacatatatatatgcatggcttgtcttggagattgtcttggagatcacaaggtttgtcttggagattgtccatttgtggtgaagccatgaaagagtgagtgcatatgctcagtcaatatcatgaataactgtctttcatcatggaccagcttagcacaatgttcaattggaccgaaaataaggagatcctgtagatgagtggaaatgtcctagtaaaatttcaagaagccgtggaggccttcaatgacatgaaacacaatgctaatgtaatggttgcatcaacgaaggagtgttgtacaaggttgtcaaagactcgattttgtcatatgattttatgaatttacgattgtaattaaaatgtgcttgattctacgattttatggttttaaattcaaggtcgcgattttaacaaccttggttttgtgaaggcattacacttgttggggcatcacgtgaaattctcatcgatgttgcatggaacccttctattggaaggcaggcgataggccatgcctatagaattggtcaagagaatattgtgtactcaaacaatctaatcgcagaaggaacataggagaaagtcaaatatgatagacaagctaggaaggatcatatgtccaaactgttgttttcggaaaaaccacattaccgcagcctgcaagggatcaaaatctcacaagaagtgattttcaataacaacatattggaagtaatgacatcacatgggggagcgcaaagacatgtttctaaagattcttcacttgtcacaggaagtgatattcaatgacaagatattggaagcaatgacatcaaatgggaagctcaaaggcatgtttgtaaagatccttcactcattgcctgtaaattattattgaaaggttaaaatgtaatttgattcttttgagattaaacaaccttggttctgtgaaagcattacacttgttggggcatcacgtgaaattctcatcaatgttgcatggaaggtgataggccatgcctatagaattggtcaagagaatattgtgtactcaaacaatctaatcgcagaaggaacataggagaaagtcaaatatgatagacaagctaggaaggatcatatgtccaaactgttgttttcggaaaaaccacattaccacagcctgcagggttcaaaatctcacaagaagtgattttcaatgacaacatattggaagcaatgacatcacatggggagctcaaagacatgtttgtaaagattcttcacttttcacagaaagtgatatccaatgacaagatattgaaagcaatgacatcaaatgggaagctcaaagacatgtttgcaaagattcttcactcattgcctgcaaattatggaaaggttaaaatgtaatttgattcttttgagattaaaatgacagttcggttcatctgagattaaaatgtttgcaatatttttacgttgtgtgcagaagtagacatgtcaggttctaagattaatcaatatttaatattttggcttctccataggaaaagcacaataatgtggagaatggtaagcttagaatgttcatgtggataaactattcacaatcaggctatgtgacttgcattaaaaggtttattgcttgaatactaaaactgggattaattgttgccatgtaatggtgatctaagctccatactattactagatctagatgtaatttgattattttgagattaaacaaccttggttctatgaaggcattacacttgttggggcatcacgtgaaattctcatcgatgttgtatggaaggtgataggccatgcatatagaattggtgtactcaaacaatctaatcgcagaaaggaacataggagaaagtcaaatatgatagacaagctaggaaggatcatatgtccaaactgttgttttcggaaaaaccacattaccacagcctgcagggttcaaaatctcacaagaagtgattttcaatgacaacatattggaagcaatgacatcacatggggagcccaaagacatgtttgtaaagattcttcacttttcacagaaagtgatattcaatgacaagatattagaagcaatgacatcaaatgggaagctcaaagacatgtttgcaaagattcttcactcattgcctgcaaattatggaaaggttaaaatgtaatttgattcttttgagattaaaatgacagttcggttcatctgagattaaaatgtttgcaatatttttacgttgtgtgcagaagtagacatgtcaggttctaagattaatcaatatttaatattttggcttctctataggaaaagcacaataatgtggagaatggtaagcttagaatgttcatgtggataaactattcacaatcaggctatgtgacttgcattaaaaagtttattgcttgaatactaaaattgggattaattgttgccatgtaatggtgatctaagctccatactattactagatctagattatactattaatctattaatgaacccaccaaaatgtgtaaattgtgtggaaaatcaacattgcacaatgattgcctaaaattttcgaccattttgatctccattttgcaaatcaaacacttgacgtatagaatatttgtacatagcatgacactaaattatctacattaaatgcataagatagaagaaaacttcaaaaacaagtaggacaacatagaactatccttagatatccaaattctaccaaatgacttaagttgaaaaccttcgcccctgtagtgttgtttttaagagagagaaaatcgggatgaaatgagcagggaacttggctttgcttatatagttagggccattttctttggcggacgacttaaactgcctgctagtgaaacaactccataggcagtggcttaagctgaccactggtctgcatttttgctagtggctgccttaaatgggctgcttgttctaacacatctacagtggaagctgagcatttttgcagcaaatgaaaaaaaaggggtggcgctagcctaaaccatttttgaagtagtgaacgtgcaaaacttgtgcagaaattaaagaaacgtattatgtgattgttcttaacagaagagtttaattattgtcaccattcaagggagtaaatacaaggtttgtctaggagattgtctatctgtgtgaaatcatgaaagagtgagtgctattcttctgtcagtatcttgaaccactatctttgatcatggaccagcttagtacaatgttctactgggctgaaggtaaggggatcctgctgatgaggtgagatgtcctagtaaaaaattgagaagttgtgatggaggccttcaatgacatgaaaagtgatgccaaggtaatgtttccatcgatgaaggagtgttgtggacttagtgaatgcattacatgtgtcacgtatagttctcttgtatgttgtatggaacccgtatgttggaaggtaggggatctgccgagcttatagaattggtcaagacaagattgtgtacacatacaatctaatcatagaaggaagaaaggagagaaacaaatacgacagacaagccaagaaggatcatatgtatcaagcttgtcacaaagaagtgatgttcaatgacaagatagaagcaatggcatcacataggagctcaaaggcatgtttgtgttgattcttcattttcaatgcctgtaaacttagagctaaatcttataatttgattattatcagattaaaatgtcatttcgattcatctgcaacaaaaatgtttgtaatcttttcatgttgtttgtagaagtagacatgacattttctaagattcatcaatatctaaactatttgcttctctagaagagaagcacctggagcccagctaaacagtttcagctccacctaaaataggagcggagttgggtggaacactctcacaaaataaactaaaaatgtggagcatgagttcagcctactccactatagacctaatggaacaataaatttagaagttgaagctttaataaatagccccttgctattcatacttaaacatttaaaaaaatctttaaattgggtatatactcaatctgaatgttggtgccccagttaattttactctttgtgtgtgtgtgagtgtgtgtttgtgtgtgtgtgtccgtgtgtgtgtgtgggtcatctttgatgggccaaaaatatcatgttcaaaatatggttactggggaggacccatcacacatatgaggtcatctatgacgtgtcgtagttgtaacccgtcatagatgatttgtgatgggtgacaaccatggctcgtcatggatgacatgcatccctgacaagtgtaatatcatggactatcatagatgagaccacttatgtatgacgggtctttaactgacacacgtcatagataaagttatctctgaatggatgctagctttacgacccactaatgatgagtgaaaatttaaaagtttcgaattttgcaaaagaaaaactcagattgagacatgccctatataaagttgtagttctcaatgatatctacaactttataactaacaatattttcattacagatcgtttacatcctcgggtaagaattacaagtgatgagatctacttttaaaaacaaaattttgagttttttcaaatgacctggatggaaacatgccccatatgaaagtcatagagcttaaacagatctacaatattataattgacaatattttcatttgaaatagttttgcatacctgaatatccattataaggtgtgatctattttgaaaaatgaaaaattttatttttcttcaaatgacatcggatgaagatattctccatgtaaaagttatagaacacgatgagatctataactgcttagttgataatgttttcatttgatgtcattttgagtattaaataaatgttaaattattcgaacattaaatatctgttaaattattcgaacatttatagaaaaaataataacaatgaatgagtactcaacatgtgatgagtaggtgagttggtaagggggttctttgtggatgtggatgtcttgagtttgaaactcactatacacatgcatgtctatattgtgcggaaaattgtggatttgtaggtagtgatgtgtgaccatgtataggatggctagtaaaataaaaaaatattttttttgagtttttttgttgctttaaaagttcaaaaatcgtaattcttgctttgtcattagtgatggatcacaagttacaacccttcataaatgagtcatcagcgatggacggcaagttacgacatgccactaatgactcatctgtaacgagtgacaagttatgactcctcaaagatgacttacaaacctgtcagagatgagttgtctatgccaggtgttcacccgtcacatgtgagatttcgtcatcagtgaccacttatctctgacgagggctgaatccgttagagatgacggtttgggcctatcagtgttgacctcgtccggcgtagtgacaagcatgattaaagtttcttcattgattaaataagtctcaactaaataagtaacacttatatactttttctaataggacgaacagtgaaacatcatgttaaaattcaaaggtctcatccatttaaaaaattgaacggaatatgtgctgctggcattgacctagataaccgtgtacttcttcatgtgcagcagggtgaccgagtgtccggccatgagaaagacgacctgcagagctctggagtctggaggtctagctctttactgaacatgttgtccatagctcaaacgctgaaaatagcaagaggtagtactttactggaggtctagctctttactgaacatgttgtccatagctcaaacgctgaaaacagcaaggggtagtacattactatcaattttcagtaaactgattactgaaagcatctcgaggtgcctctgctcatatttttttcgtttgacttactctcctacattcagatcggtctagcttaactcatcacgcctctactattaaacattgcaagaccttcagaatgctccatccatctccagaatcacatcctaccttcagaatgacagacaactgcaacactttctccaccattgtcgcggaggccgtgagcgggtcacatgtgatcaagatagctgggtactcaagaatcaaggtgttactccgcaacggtgagtccctgacatccatccctttcagcgttgcaggccacagctggaccatcagattctaccccaacggtgattccgcggagagccaagattacctatcgttctatctgatccttgactccgccaattcctacgacgtgaaggtgattttcagcttcgagttgcttggcaagaatgggagatcagtgtcgtcttacagcttcactacagatctccgcaccttctcctacaaaggctcattgtggggatacaacaagttcattcaccaaacggtattggaagaatcgtcagcccatttaagagacgattcgttttccatcaggtgtgacatcaaagtgttcaaggagatctacagccaagaaaccaagggtgttcatagcaagtttgtggaggttcctccaagcaacctgcatcaacatctaggcaacctcctagacagcatggatggatcagacgtggtcttcgaggtcggcgaggagagattctctgctcataggtgcgttcttgctgctcggtcatcggtcttcaaggccgagcttcttggcaccatgaaggagaaagccgatggagccattcaagtcgatgatatggagcctggagtgtttaagtctttgctgcatttcatttacaccgattccctggacacgatggctcaagaagatcagagcagagacgaagcaagcgaggaggaggatttggtgatggctcagcatctacttgtcgcagcggaccggtacaacgtcgagagactgaagctgatatgcgaggagaagctatgcgagagcattgactccagcatggtggcaaccagtttggcgttagctgagcagcacaattgcaatgggctcaaggaagcttgctttgagttccttgcatctccttccaacctactggagatgatggcaagcgatggttatgaccatcttaaaaccagctgccctgctgttctcaaggagctcactacaagatttctgcctccggaaacgaaagcatcagaagagataaccattggtctatataattagttcttcaagtatgcttattttgattgtgataatcgaaaagaaagttttttttagtgctaatgccgtggtatttctgcaccttagaaagctaccaagtttatctttcctggaagtaatggccttctatggatcaagtttttcagttgtttctgacattttttttccttggttttttctgaagtgcaaaatttgaccatgtatagttagtccctctatactgatatgctattactctatagcccttagaaattccatgcgtactatcatatctgaaaaataattaattgtgtgcatttcaatagtcctatttgtaagaatttctttgtttagtagatctaattccagaaactaacataccgtgaaaaactatatatattaatatcacagtgcttttacatgtatatttccaatacgatccatgagcacagaggaattttagagaaatattgtaggatcgaataacaagactaagccttccagagagaggtgaatggtcccaacaccaaaaaccgaaaacttttaactgaatgaaaagtcactctcgaactgatggagatcggtctgaccggagttgaggcgctggtctgaccgcacagatgcatccggtctgaccgctgtagccgctccgatctgaacgtccgtggcattgccgtcgtccattgctgctgaggtgacgccggtctaaccgctagtattcctctagtgtgacaaagttgaaagtagattgatttttattacttctatttgtgtttacaaagtgcaacaacaacactcctcgcacaaacccttctccatcggaaagatttatggaatggatcagtcatgggtcaggcttatccaaggtcactgccggacccaggggttccaggtgtgcaccggcatactcaaaacttccgaagtaattgtagacctccgtttttcaatagatggcactgttgactttttgtcgtacgtttgaccattcgttttattgaaaaaaaatgtgagttgttttatcactcaaactactttaagcatgatttataccgtatacatttgcataaaatttttaaataagacaaatggtcaaatatttgttcaaaagtcaacgacgttatctattaaaaaatggagggagtacgtatgagtagtttgtagcagtgggctgaatgatcaatgttcgcaacaaagacttcattgactttttaggccatgtttagatgggactaaaacttttaagtccctatcacatcggatgtttgaaaattaattataaatattaaacgtagactattaataaaacccatccataatcttggactaatttgcgagacgaatctaatgagcctaattaatccatgattagcctatgtgatgctacagtaaacattctctaattatagattaattaggcttaaaaaatttgtctcgtgaattagcttttatttatgtaattagttttgtaagtagtctatatttaatactctaaattagtgtctaaagacagggactaaagttaagtccctggatctaaacaccaccttagtccttctaggacaagacccattgcaggaaagacttcattgacaaaacctattccataatcctgggactaattttagtctctgtcacatcggatgtttggttactgattagaagtattaaacgttgactaataataaaactaattgcataaataagagctaattcgcgagacaatttttttaagcctaattaatctataattagcatgtgtttactgtaacatcacatatactaatcatggattaattaggctcaatatattcgtctcgcgaattagtttagggttatggaacgggttttatcattagtcaacgtttaatacttctaattagtgtcaaatatccgatatgacatgtagtcccttgatccaaacaggcacatagtccattcgctgatttctgaccatgattcccaaacggaggcacgccgtggctcaccgccaatcgggtccagcaaagtggcgatgtagctcaacaagtctttcacatttttacaaactttacttcctgttggggccaaggttatattcagtggcaaaaatgttcagtagtgacctggcagaggtctttcatatgccactctcatatcaagattgtcaggaattcctgaaaattagctcggaaatacaaggcacggtgttaagctccaatgcagataaccggagtactggacatatatatggggtcgacacatattttttttatgttttgaacttttttattttttaacttaaaaatagaccctgcaaaagttatttccatattatgatccttttggctacgtcattccatctgacgtggcaaaacattactgacacgccacgcatagcgggcaaaacaatactgacacgctacgcatagcgggcatgatagttctattttgccatgccagcgagggagacgtggccaaataacgctgccatgccaaccagatcggcgtgaaactgttgttttgtcacgttagtccagttcgcgtagccaaaaggttcgtatcttgaaaataagtgttgaaagggtttatttttaaaattaaaaattgaaaaagttcaaaagataaaaagaattcgtcgacgcacctactcaaagattgtgcaaattcttcttcgctggaatgcaacctccgacggggtcttttgatatggaagaaaaggtgtataataaaaataaaagttttttggctggttattgttcaatgatcagctaaatacaagagaaatgatggatctcgaacattgtgcatctctaaatgcaatactcacttgttctttgtgtgtcactgcatcaagagaaactagaacctagctgttctttgactgccctttcagcagggcctgctggagttggataggaatgcaatagtctctaaacttctataaaatcgttgttcttgtgagattgacactgttacagaaatgatttttctggatgcccgtcccggtagattccagacgggttgtaagtggcaccgtctggaaaaaccgggcgaccggtgccgggctgtcgcccgtacagaaaaatgcattatctcatgtggtcgacttaagaggaccacacggaaaaatcaattttcgcgtgcgagcctcttaagtgaaccgcacgggaaaatacatctccatcttttccctgtcacccacttcaaattttcacatcctctctcttccttttccctctcaccacttcaaatttttcacatcctctctctttcttttccctctcacccacttcaaaatttccacatcctctctcttccttttcccttttattctccctcactccctcctctctctctccttttcctatcctctccccctcccctctctctctctcctctctctctgcctctttcctctcgtcgaagacgaatccatccaaagctaagctagcctgcatgcacttggtcgatgaagtacggggcgtcgccaccaccaccgctgatggcgcgggaggaggcgcagtggctgctggcagaggcggcggagcggcggctgttggtggaggcggcgtggcggcgacggcggatggtcacggcagaggccgggagcggccgcggtgcaacgaccagcgacgacgaggacgacggtgaccacgagcggtagcgcgacgacgacgaccacgagcggcggcggcgcaccgacggtgacgacgacgggagtggcggcggtgcgacgacggcgacgacgaggacagcgacgatcgcgagcggcagtggcggcgggaggagcggtggctgcgcgaccacggcgacgacgacgggatttcttcgattttatttttctcggtttcttttatttccgtgcgggtggtataatttgtccgcacgggataatcgattatctcatgcggtcaacttaacacaaccgcaaccgcctggatgcgaaaatattgattttcgcagacacctgggtgcagacgggcaggacctctgtacgaaaaaatgcattttgaccacacggagaaatcgattctgtagtagtgtgacattcaggaggaacggatttatggaaatagcactactagctttgctggcatttcggaaacaaagaaatgctcttatctttcagcagattcagcctaatgttaacagatggtttgactgcttcagaaatgggattatcttgcttcaggatgaatgagcaactatacaatatagtgctgttacaatttctgaaattgttctgttttcctcttcctttttcttttgtacttaatgttttctttctttaatccgtaatatttaactactgggccttaccagtaatgttcccttcaaaaaagatcatacttcaaacaaagtgaaaaattatatttattagcaaccttttgaattaggactagttgtttagtagtcaatagaaagctcaaagtacgaatctactactaattacatgattccttatttttgatccaaatcacaataacttggaatttatgaagtaatgtatctggtatatgtacgataaatttttgaaaattaataacatcaataataacctgagggagtagtatttacctaatgtatagtttctatacgtgggaccaaatataataaatttatctattatcttctcttttttgtatttattgatttgcctgccgatttgtgtcatatacacttttttggggaaagtgtcatatacactattttgatcctagtacaattttacttgtttcttttttcagtacaatcttacttgtttcttttcttggtgtactcggtgtcttggtaaaacatagtttatatttttcagacctcactaattctcttgtaaaattgtctcgtgccatgtcatttggagtttttttactacctctcgttcttaaatctaatgatggctctttggccagcctccatatccatggtacgattggtcagccattctgaaacagggcaagcaaatcacaaggtttgtcttggagattgtccatctttggtgaagccatgaaagagcgagagcttgtgttcaatcaatgtcttgaaccactgtctttgattatgcaccagcttagcacaatattccattggactaaaggtaaagagatcctactgatgagtggaaatgtcctaggaaaattttgagaaactgtgattgaggccttcaatgacatgaaaagcaatgccaatgtaatgcttgcatcaaccgcggagtgctataaaggtattacacttgttggggcatcgcatgtagttctccttgatgttgtatggaacccttatgttcgaaggtaggtaagcaaccaagcttatagaattggtcaagagaagattgtgtacacatacattctaatcgcagaaggaacctagtagaaagacaaataagacaaacaagcaaggaaggatcatatgtccaaactattgttttcgaaagaaccacatcaataccaaagcctgcaggatttcaacttgtcaaaaaaagtgatatccaatgataagatattggaagcaatgacatcacaaggggagctcaaagacatgtttgtaaagattattcactcattgcctgcaaacttagagctaaatctagtaatttgatatttggaggttgaaatgtaatttgatcttttgagattaaaatgccagttcggttcatttgagaataaatatttatattttttttattatgttgtctgcagaagtagacatgatattttctaagattcatcaatatatgaactcttggcttctccggaagaaaatatccagaatgtggagtatgataagctcaggatgttgatctggttaaattattcattgtcaggctatgtgttgattgcttcaatattaaaactaggactatttgctcccgtgtaatataatgatttgctctctttcgaaaactgttgcaatggaaacatgaagtttccatatcgttggtaactggtaagtatatggaatggcactatagcacatccatataagtgcttccaacactagttgctcagcatctacatcctttaattatctcaaaatttatgaaagcagctacttatgtgtttcttatttagagatgcaacagagcatcttatctgtggagaagaaaatatatgtgtgcacctccattctatcaagatggtgcttcatcgaaatttctttacattatgctcagataatttaatagaaatagtagaaaactaagggtagtttcttcctgattttggaagaactgagattatggtaattctcttaattgcttgagctccagggttcattgagttcttaagctagatgcacgaacggatgactcttgagatgatctgttcttaaacatgcacgatggattgatcacttgattgtagcatttttacaataactggttggtgattgtttagcattttacttttgcattctggtcatcgtaataggctgatgcatgcagatatgatgctggagtctgtgctatccatttcacctgtgtggtggtgtgtttgtgttgttgttgccggtttatatgcaatctaaacttatttggtatatgtatataataaatagagaaaatccaagaaatgcctttgacaagcgcccaattctaagaaactagataattccccacgctttgctgaggaaattaccaagtaatttttattttttaataatcgagcaaaaagtaaaaattatattagttattaacaacaaataaaactggtttgtcaaactacgttaacagagaaataaatttagtagactctgtatgagattgtagatgaaatatgatatcccgcactttgattatatggatgaatatatgttaattattataaaaatgatatatatatatatgtgtgtgtgtgtgtgtgttaaaaatattgtgaagaagatgattggatgttgatttgtagaattcaatgaattatagatgatgttgcatgcttgtataagttttatatgtaattattgctagtgaatgatgaggtgacatgttttcatgttgagtttttatagatgatgttgcatgctggcataagttttatatgtaattattgctagtggatgatgaggtggcatatttgcatgttgagctttagaattagtgggttataactttatagtaagatatgacgcattgataagtacgagttccatgaaatatcattgtataagtgactatgtcctagaagtgtgatcatcgttagagttttgttagtaaccctccgttaagtgttataggataaacagtgctagttaagtgttataggatgaacagtgcatttaacagggtaggatggatggaaccttaatggcgatgacattttatggacaaagtcgcttgtacaatggtattttatgaaacttgcactcttcaatggtatttcttggacttgggcatttgtcaatggtatttctggcattttctctaataaataacacgtctcattcacaatttcatttgcatatccctgtttgtaattctagaactcaatgcttcaaaaagtagcatttaagtgcacgaaaaatttttattttaatatgtaaattgcagatatcgtatactttcttgtctgttttacatactacatgattgaattttcctgtcagactgcatatttgaaatgtgctcacacggtcataccgctcagaaagttttcgatctccttaattgctcgttctagtttgctgctaatatcacccaattcccacaacaatgatgtatgtggtcgtggattttgccataagttcaaaataaacagggagaattgcaaatagatcccctcgctgcctcctctctcctggataagaaccgatcccctccctctcactgcaagaaagggatacagggtagcggtaggtacttcgtcggcggcaatgcgcggcaagcagcagcagctcaggacagcgcagcagccagcaactagtgggtaggctggcagcggcagcagcagctcgcggcaagcggcaacagcacaaggcagcaacagcagctcccggaagcggcagcagcacgagcgctcgcggcaagcggcagcagcgtagcagctcgcggcagcagcagcaggctggtcgtgttgagcaggcgcaggaagcagtagcgggaggcatggggcatccttgtcctaatttttatgagaactcacattctcacggtgttagtttgatctgtcagtttaatggcaagtattataggttccaaccatttttggtggcaactaggcaattatgttttttataatggcaaatccacgataccgattcaaaccaatggcaaatatgtaattggcccaaataaaaaccaagtgagtcaatttgcacaaatgtgatgagacggtaaaaagatagtgatactgggagtgcctttcatctggtgatattcacatttgagcgttcaaactgaagcacaagtacttaatagattaagcagacacaatagagagatggcaacaaacaagttgcagcagtgaaaaactggtctggtgccaatgagctcccatgtggcagtggggtgtgccacagaatggaggtgcgggtcacgagaggaggtaagggcggcggtggtggcagccgctagattggtaggggagggagatcagagttaggaggagtcatatatgggaggccgtcaaacaacctaaatcgttgcggttggcaaagccatcctacatgttcccctgtatgcgcaatcgctagaaacatgcacacacttgttcgtctaatatcccttcacgctacaagtgtggtttgccatatggcaaaatcttaagctcatcacgtgtctggatgggtactccgacctggcaaccaaccaggtgggcagacgctagatgttcgctagaaagccagggcaaaatggtatttgatgccgcaatctgccttgtttccttgaggatttgaaaggaaaggaatgcccgcatcttcaacatggtgtcttcctcgttggcagaagtagccgattagataattgaagaatgttgcacttggcgtgtggctggcctagcaggtccggttgtagatgaccatgaaggcgtttgtttgtatatgtgtatttccttgtgcattacatagctccatacttagccgcatagaagctcttgtggagctgcggttttaaccttcagtgcatgttgatggcaacccaactatcctgttggttttctgctttgcaactttttttttctccaaatcttaatgaaaatgatccacgttccatcgcaggctcggcaaagaaaagagatgggaggccctggcccagatagtccttgtgattgttgggtttggttgggcctttctgcgtttgtaagttataccataaatggtaggcacacaatgacgtaaaatttatctagtgataaatggtaggcacacagtgagtcagcgaggggtagggcgccgtaatggctaattagcgaacatccgctaactagtgatctagcgaatggatctactttcttttttccgattattccaattatcactaataattgcctatttctatttttggcaagttaatcctcgtaacgtacgcatgtgtatggggtgtggctgatcggcgaccagccgcgcgggcccgtactcgcgccgttcttagtccattagtacaactactactgctacaataataatactactactaatactactactaagtacattattactactactagtaatactagtactactataattgtttttatatgtatatatacacatatacaaagtttatatatgacgtatacaaaatttatatacgcgtatacaaattttgtatacgtgtatttttggttttttatacacgtgtatatatatatatatatatatatataaccttgtatacgcgtatacaaagtttgtattaccatatacaaactttatacaaactttgtatatgcgtatacaaaagttttgggtttttatatacgtgtatgtattaaaataaaaaaaacacatatataaactttgtatacgcgtatacaaagtttatatatacccgtatacaaactttgtgtaggcctgtacaaagtttgtatacgtatatataaaaccgaaaataactgaaaaaatatacgaaaaggaaaaaaacagaaaaaaccaaaaaaggaaagaaaaaacagaaaaaagaaaaaaaaccgtccgccagaaaaaaaaattccacacgtcgtcctctgcctttctccccgcgcgatacgtgtccggtcgcgtgggggagggggcgcacgactgaacgcttattagagttctcgctcgcatgtgtatgtgcaatgtacccactgcatgcgagttttggggccctatttttcatgggccagtttaagcccaatacaaagctttcatctttaaatttgtttttaaattcgtttagaattcatttccaaagagtttctatatctaacgtcatacgtggaaagtctgtggatataaactttgcatgtataaagtttggtcatataaagtatgcacatataaaatttacaggtcaaagtttgtgtgtataaagtttacgcgtgtaaaaattagacatacaaaaaatttgtacgtaggtgggctagaaggcctacaaaaataatacaaaggaaacggttgaaatagaattttcgggaataaggggcctagcttgaaacttctttgtgaaagtaggctatattttgacacattcacatatggatcctgtattatcctccttgggcatttcccattcgttttgttccttcttacacacatgaaggggttggtacggtgcatgatgcagccattcgcaaggtgtagcgcgcgcacacacgcgcactagactcacccggggaaggccgcaactgcaagacaagttttacccagtgctccctgctccggtaattttcgttggtgaggacctcaagaatgtcgccgatgttgatgaacgaacgcgaccggcagcgagcgcaccggaaaccactggctgtcatattgctgacctgcagatcaaggggtatcgtcaacgtggagtagcagctctaggcttaggccatcggagtgcggcgtgatgcctgtcaccttcagtgggtggcggcagggaggattgcagtggcagtgcagagccatgctctgtcgcacgcttccttgcggaaggcggtgagaagcgtctctcgttcaactccaaggacggtgaccatggatgctagtagtaacgccgttgccagattccacatctctgtcgcgtgtttgtcaagcaaatccgtgtatatatactaatataggccttgtttggatccttcgggctattaaatagccctccgaaattttactatttaggagtattaaacgtaaattattgacaaaaccaattctataacccctaggctattttatgagacgaatctaacaaggtatattaatccatgattagcggatgattactgtagcattactgtagcaaatcatggattaatatacctcgttagattcgtcttgcaaaatagcctaggggttatggaatgggttttatcagtaatttacgtttgatactcttaaataacaagatttcggagggctatttaatagctcagagcatccaaacagggcaatagagtactataagcttaagctatatgtacagatgaaactgaatcttcttattgttttttgtgaatagcccgtactatcctttgagtttcactccggggttagtttaatctctgatgtttcattttatccaaacaaaccgttgaaatctagcatttggcttaacgcggtcgttaaaccgaacaaaaaaacaccacgtggcattgccatgtcatcctcgcatgcaaggacaacaatcaaactaccattccatccttatatatacaccatattgcagaaaaaggaaaataagtaacaagccagaaactcatgacataaataatatcgggtgggctttctatgattttaccttttcacgtcatttttttcttgacaattatactcctcaacgtgtttactattatcaaacgaggtggtactataaatagatctaaacccttagataaaattaggtctacaatttagattattttttattactagtaaagagcatcatagtgtaccttttaaaacaagcatgtcctagctataactaagatctagagaaaatacttaagctgttagggtgcgcccggcccattgtactatgggccacccatattacattgggcttgctccaccacagacccaactggagccacaactttagctcttttctcgcaaaattaggaagccacatcaccggagaaacatagagcatttgatttcagctccaaacgatgtaaaccgttggatccttaaattcgtgaaacttactcctgactcttgacgaaacttcttttgcaaagaagacccttccgcatcctcacgtgagagaaaaggagaaaaaaaaagaaggaaaaaaacttgctttccttcgtcgcttccgctcctaaatcacgccgcatcctcttctctcttctcctcatcgttgtcgccgccaccgccgcttcctccaactcctccaatgcctctgcagtcgccactcctccttgtcatccacgcattcaccatccacgtcgcctccgtatgcctccctccatgcctctggtgactggtgacagcacggcggtggtaaggcacatcgcccctccatctgcattgccacctgcaatctgccattcgcttccacagaacaaatggtaaggacattactgaaactataaagggtcactggtgttccaaatcactaaattctccatattccaaaatgagcaaacaacaggtgtgtttctagcatgaatttcaatcatccatccaccgatcatcatatttgcaaaccaccgaatcagtggtgtacacaaataaaaggtgactaatgtagtaatatttataataatgatgatataatctgctggttcaaacatgaaaaagacctgattatggacattgtctttccgttctttacatggtacatatattactcaactcacaaaagactaatgctctgtgcagattataaaagctcttctggaggaagaacaattaattattcttgatgagttagtgcgtctgaacaatcttaacatcgacgtacatttatgatagtaattcctactccctccgtcccataatataaaggattttaagtttttgcctacaacatttgaccactcgtcttattcaaaaaattttaaaattattaattattttatttgtgacttactttattatctacagtattttaagcacaactttccgttttttgtatttacaaaaaaaaattgaataggacgagtgatcaaatgttgcaagcaaaaattgaaaatcccttatatttcgggacgtagggagtatgttgcagataactacagtgccctccaagcaaatgttgcagattagaatctgtaatgaaatgctctaagttgttttaagactgtgtcatgttagagttagaatctattgtgtcatgttagagttagaatctattttctgcagtcgacctcatatgtaatcatttgtagtacaataagatatttaatttttaatgttagttagattccaaatgaaagtatagtactaaattaaatttatgacaagggcatgcatgttagtatgttacataatgtaattaagaccaaatttgacctagaattttctaatattatcttataagaactaattcacctagagttttctatggaagtatggatgcttttaaatcttgatgacagagaaggatgtgcaatatctgtacatcttagatagctaccttaatatctttatctaaaaaaaagaagttcagatgaattctgcaacttctgactgaatatattttagttaaatttgaagaatcgaatagcaacaactaagctaaccaaaaggggggtgaatggttgtagctacaatagtcctcacatcaaacctagaaaatattgaggaggagatcatcccctttttgcagctcaatactattctgatgatcaccatccaattgaggttcttgagagattaatttgaattgtgtcatcaagattcagatgccatggataataaccattgatgccatgaaagggtgatcaacattggcccgagtacagatttcctccgaattacatggcattacatcgtccatcgttttttcttagtgaaaattgaaactgatgcaagttttttagacttgaaattttattttgtactgaactgggcggtcaccacgcctcgaaatctcaatgtatactgatgatgcagtagtcttcatcaacccaaagaaggatgatgtacaagcattccctgcgctccttgaatgcttctgacaggcaacaaggctttgcaccaacatacataaatctcaggtgatgctaatcaggtatgcctgcttagacctcgacgatgtgctagaaggcacgccggtgactagagcgagcttccctatgaaatacctggggctacccgtagccatgacaagactacgtaaggcagacctccatccattatttgacaaatccgttggacgcctagtgaggaagaaacattgggatagtagggcaaacaactctagtcaactcaatcctcacatcgcaacttgtctacttcccgatacccctaaaatttacaaaggaatccctagaggtgcttgagaaatagaggaaacggttcctctgggcaggggcctgatagcatcacggacgaaaaatgcaaggtcaactaggcaagaacttgtatgccaacaacttatggaggactggggatgctcaacctggaaaatttcatgagagcgctgagggtaagatggatatggcacgagtggaagtaacaaaaaaaaggcatgggtcatctagacactccatgcaaaatatcttataggctactatttacgacagcgacagcaataacaactggagatggggaagtgatcctttcctagaactcggcatagatgcaaggaagacgcccaaaagacatggcgccaaaagtctacgcgatctccaagaaaaaataggcccctccgagaggccatcgaggacaacacatggttacgggatctcaacttatctcaacttatcaactagtacggacatgacggtggaactcctagaacaaccagtcaccatctagatagcagtgcaaaacatcaaactcaactttaaggaaaagaatgagatcaaatggaagctcatatgccaaggagaatacacagctctttcaacctacgaggcacaattctttggcttagtcaatacgaattatgagatgttgatctggaaaccatgggtgctgaaaaaaatgccagattttcacctagctagttgtccagaatagagtttggactttcgacaaacttgcaacacgtgagtggccaaacaactcctactgtccactctgccgccacacgctagaaacatccttccacctcctggtggactgcagatacacaagtaaaatttgggagaccttagcaaattgcgagcagcacaagccgacagagtggagtgcaaccacaataatccatgactggtgggcagagctagcaaccaccaaatgactattgaaaaagggagtctacacctaatcctcctcacggcatgggaagtctggaaggaaagaaacaaaagagtcttccagcataaggagtttatatccatcagatccttgggagcaaagatcaaggaggaaggcaaaacttgggcctcagcgggagccaaacaccatgcgcttttaattccttaggccttttccctattgtacaattctttctttttattctacatgtaacttttacttctcctatattcaatgaaattggcacatcctgaaaaacgagcgagcatgtagtcttttatcatgtaaatatcatggcatgagcaagttgatatgtggctacagtggtagcagtgtgcacttgttagggcatgtacaataagtatatatgttataacaccgatggcagaagttcttccacatatattaagaataagagttggctcagtttataaggaagatcgggccaaaactatacaactagacggttaattgaggggaactatcaaaacctacactgagggcaaaaggagaaaacaaccttctacaacaaaactactaaggcacacggctcaaataattgttgccaagctcatcaaccgatgagcagcaccgacttctcaagatgggccacaacctccaaccagacccatacaattaaaaaccattaaccatggcggatggcttggcagctgagtgatgccacgtaagataggaatagttttttttccttttttgtctttttattcgccgctcgccatgcccaaccattaaccaagcttcttggtgggtcgtggttgcctctggtgttgcgagtagtttgcctggccaatggcgttgcgaataagtgtagttgcgcttggccaatcaccgtcattagatgtgctggccctaggagctagggatgggcgtggtctggggtgggctgacccaaactcgtcccatgtgacccaccaattctacaacaacactagttccaatgggtaccatgggtcgacccatgaaaattgctagtgtactgaatttagaagacactcgacagagcaaaccaagtaaaagaaactaggtaaaaccccgcgcattgctgcgggaatttagtatgataacaataaaaaaaataacgtgtaagatagctagataacatcagattaagtaaattaatgtggtttatgataatttaaatttaaatagtatgtagaatgatgagtcaaacgtaaaaagtaaggtggtatgacttcatggaagaagaaaagtagggagatagtttggaccgtagattaatcatctaaaggctaaaaacaattaatgtgatatgacttaattagaggaaaagagaaagataatttggaccatagattaatcatttaagcactaagtgaggatgaactatattagtatataggatatcataaaacgtaataaagatatacattgaaacattatgtgaattatgttggatgataatttaacatgtttgtatttgaaaaagctcttaaattataaaaactataaagatatagcatgtttgcatgatgtttaaatgtgatgattgttagtggatgatgatgtggcatcttgttaattagtgaatgatgatgtggcatcttgttagtggatgatgatgtgtcatctttgtatgttaagcttaaggagttagttagaggaaaaaaagagaaagataatttggaccatagattaatcatttaagcactaaccaagtgaggatgaactatataagtatgtaggatattataaaacatagtaaagatatacattgatacattatgtgaattatgtgggatgataatttaacttgcttgaattttaaaatctcttaaattataaaaactataaaattatagataatataacatgtttgcatgatgtttaaatgtgatgattgttagtggataatgatgtggcatcttgttaattagtggattagtagatgatgatgtgacatcttgttagtggatgatgatgtggcatctttgcatgttaagcttaaggagttagtgggggataactttatagtaagataggatgtgtacgcttgtattcctttgtgaactatgaaatcaatgttatgttgaagcaatcgtggaagcaaaaacaaaaggaacaggcttttcattgtttcactagacctatctaatttcagagaaccaattaaggaagtatcatgagaaccaataacaaacaaaccggctatgaggatttgggtgaagggagaaaatgacggtgccgtcgcgtgcctgatgcaagggatcgatcgatacctactgaagcagacccaaatacccacttgaaccggtctttttagtttgggccgggccacatacccattaaagccaaatttatgggacaggccaatgaggctcgtgggtagacttggaccatgccaatccctactaggagccaatcacatcgcttacatggggccattagattagaaatactaataatatagagggaaataaaaaaaaacccaacatatacgcaggcaacgtccatgctcctctgagaataagaatatatgaattggcctatagttcgatatgccaactagaatcactatgagatattccttccctcccaaaaaacccaacctaattagggatgagacacaaatggtacaacaaatatggatagcctgttcagattcgttgtcccatgttgtgtcccattctctactagcttaggttttttgggacgcatggagtattagagaggagaggagaggagaggagaggagggtgagagtcaactttttgcttaaggaaatgttggagttgcagtagcaggtcaggagtgatgaacatggcgcgcactgcattaatgctctaagagtcacaacataagtaggcgattcttcataaattttgataatttgaccctttgcaaaaactatttttacaaactgaatgtacgttggcacgctgacttagcctcccatccgcggtggcacggtattcagcgccacttgacgtggcgctgaggtgtctaagttcagcgccacatgatttggcgctgaaaaaggggtcattttttaaataacttttggcggcagttcatttgtaaaattagttttttcaaagggtcaaattgtcaaaatttgtggtgattcttgatgcacatagctgcctgtggagattatgggtaccacatgcccacacggtatggttatccgactggttataggggataacttatatctatagaatatgtaacagatcatgatttaggtattacgtttccctgtatattatggaacggcctaaagtcctgatttgataatattgtaaaatagatttaggaaactgataccgtatttgttaaggtttttatcttgtaatcccgccctccatcctatataaggtgggcaggagtccctctagggggcatgagcacatatgatcgtcagatctatactacacccggcggattcaaatccccaaacatgagtagggtattacctctcattgagagggcctgaacctgtctaaatcctttgtctccgcatccatccacttttatgtctcgtgcgctacccccttttattattgccgaattcatgtttcgacagttggcgcgccaggtaggggtacgccgagtttcctattgaggaatgcgatggaatcaattttatgagccgccggcttcgccttagcctcaggagcttcgacttcgtcgccaccgacaacttcaacaagcctcactctttgactttgattcaaatcagttggagaagatctaatctagctaaggaggataacaaccactctaccacgttgagtttcagattcgatctactatggccgccgccagcgtcaccttcatcagcaagctttttcgcttcagagagagaaactttatcgtcaggagaataaccggatactactgtcaacaggatcgtcaatagcatgggccgcatgccttggacgatacacggcatgctacaaagtttgcagtcctgatcttgcgacatatgtggtgtgcggttggctacgcacgcgcatcatggcccggccgactgcttcgatagccaaacagtccggtcagcatctttcctcgatctcacagcgacataatcaggggcttcggagcagctctcttattacatgcatctactcatcatcaccatgtattgcatggctgcctgctacaagccaaccaatcaagattccttaatctacaggctgctaccaacaatcgcaggcttgagaccgatcgtccaataagcatcgatcagtgcatatgagtcaattaatctactggagcaaatacagatgcatgcttgcacattcttttatctcctaatcagatatgatttgtatttacatgtccgactatgcgacagccatataacaggcacgttgtttccgatatcactgacacgatcttcatggacatggacttcatcgctgactggtttgttcgtcctcacggccggcctactacgttgctactgatagcgacatcatcttcaccgaccgtctcgcttccgtcgctgctgccgactggtttctccgcctacacggctggcctattatgccgccgttggtgggcatcgctttcaccgtcgaccgccttcgtcgccgccgattggtgtcttcattgttattgatggacgactttgttcccacattggccacctctgccatcaccaaggggaatattacaaagctaagtcatcattatttttctttatatgatatttttcttttcctctacctcactacatcaattggttcgccgttgactagtgagtcgggggctacatatgttatatcatattttttaacaattttcataatatttatcttgattgcttgcgacataatctgagtacaaaagtgcctatcgagttatggagttccatcttcctatgctttccgtttggtttgccaatggatagttgcctttgggccgattcctagcacccgggggctcgttggatggaccgaataacgcaaggtgcttagtattactcggaataattaaatcagaagcatagagatgagataaatttattttctgctcttaataattgcaaaagtacccgagtagtaaattctgatccgtgaaactttgttccattaatgacgaactcatgtcactcatatgcatgtttgggaagtacttaggctgactcccggtgcctggtggctatgactagtcgggcagagtgtttaaacgtaatgagtcatttgctcgtggaaatcaaaattgacaagagaagaaatacatatttataaatattttaaagtacttgaattttcatcgaggactgtttttacatcagatactactcatcctatatgtttgttctgcaagatccagatccagatatgcacaaaagggattcatggctttaagcttatctcttacgctccaggaatgaatcagtcagaacatcaccaccagcttgccgtcgtcgccgccgactggtgtcttcgcctatacggttggttggtcacaccaccgttgttgggcgtctacgtcttcaccgaccggccgcctcatccgccgccgactggtgtttccgcctacacggctggcctattatgccgccgttgttgggcgtctacgtcttcaccgaccggccgcctcgtccgccgccgactggtgtttccgcctgcacggcttgcctattatgccgccgttgttggatgtctacgtcttcaccgaccggccgcctcgtccaccgccgactggtgtttccgcctgcacggctggcctgttatgacgccaactgatgctatcttcttcacggctggctacgtcgccgccaccgctaataggcgtcatcatcttcaacgcaagctgtctacgtctgctgccgactagtttattcatttccatggctgcatgattctgccagtgttaattggccttatcttcttcactgccggtcatctcgtctgctgttgactagtgccctcacctctacatatggtttataccgctaccactactgatggacatcatcgtcttccgtcgccgactggttatgccaccgccgactggtgcttttatcttcacaactgcgcatcttcactaccggtttgcttctgttgccgctgactcatgtgcaacttcattactgctatgcaactttgtcaccatggtggagcaacttcatcttcatggtcttctgcaccggcaatctctattgctgctacttcgcaagttgtgctacttcaccaactacgacgtctacatgagcctcgacatattggcatgcgtcacgaaatttgacgtcgtgctaatctactactacaagtagttctataattttcaagacttatactcggacatcttcaacatgtaacctcacttaagcaatgagtactcgacgacaagctacagttctcgactctatgttcagttgtttcccaactaaccaaagagtcggaggctacacaaatacaagactcaaaatccgacaagttttatgtcaagataaagcaatcaatcaatcaaggagtcaactttaggagtcattatcttcgtctttacttcagagcagacgttctacttcagcaactcttattatttcactggcaattttgacttctggatgccgccacaatctgcttcaaattgctcaagtgtcaagtttgagatttaatatacatgtccgggagtttagagttatcaatcaatcagctcagtttcgacgagttggacaacaacatctacattcctctaagtgaagcttctacaacagctataacatcaagttctactgtcatttttataaatcaaggggcattgcatcatcttcgttatgcacatgctcgccgttacctatatatacttcatcggccctgacgtcttcgccgttgctaatggctattatcaatggacaattatgactacgacagaaggataagctacatgcataggggctcatcaactcaagcgcgagaattatatcttcaatttggacttgttccagatacattcaacttgaatttatggtcatgagtcgatttcttattctcaatgactggattattcattattccccgtaagggctatcaaccgaatacttgtgccagtcgggatttaatttttatatctattttggagtatcccatgagggataatcactcagatcagaagctattcacatgagctacacttggtatatatcacccagaagatttattacttaggagcatgttatatgcgtcatcctttaaagggtgtcgaaggcatattttttggcctaggcctaatatgtctgcagcccatattttcaggtgtggcctgtcacgttattttagggacttaggcactttttgcttaggccaaagtgcacgtgatcaagtgcccaataccttaaaatccttttataccgcagttgctcaactttttaagagttggtacaatgcatcttaaaaggtacccaacggtgaagtttttcatagctgccccgctgacttttttatatatagtcaaggcgctgtttgggttaataaagcaattgattggatacgatatcattgctttttggcacgtaagtgtgcacttttattgaccaatattatggcttaggctgattatatattgtggtaattttctaggtggttggtaaatcatttatgagtttatttactcggatgttacaccacatatgccatatatttttaggtgtggtgaaaccatgtgtcttttagggacttaagcacatctgttaaagcagtgtgcgcatggcgtatgcccaatactttagaaaattctttattcacagcatacaagcttctttatggctattttgctatgtgaattttcaatgatgtagccaactttaggttgcacacatcatattttacaaagcagtcggtatattactcggatcatattattcggagattcacaccgcatatgctatatattgatatcaattcacttggttgattacaattatcaaagccactcggttggttgaattatttattccttgactatatgcttagtttatttagctaaccacatagtcgggggctacacctattaggtgcgtctaatcgatgcacctgactttatttttcagccctccacagtcttcatatttggtaaaagtactcgagagaccatggcaaagataattgaagcatttggctttggagtaatctggttcgagagaagattgttttttgactgtgaaggtctcaggggctactatggagattatgggtaccacatgcccacacgacatggttatccgactggttatatgggataacttatatctatagaatatgtaacggatcatgacttgggtattacgtttccctgtatattatggaacggcctaaagtcttgatttgataatattgtaaaatagatttaggaaaccgataccgtattggttaaggtttctatcttgtaatcctgccgcccatcctatataagatgggcaggaggccctctagggtgcatgagcacatatgatcgtcagatctatactacacccggcggattcaaatctccaaataggagtagggtattatctctcattgagagggcctgaacctatctaaatcctttgtctccgcatccatccacttttaggtctcgtgcgctaccccttttattattgccgaattcatgtttcgacactgccagttgttgaatatatctcacctaaatcaatgtcaaatttccttggttatttgatttttacaaaaaaaaaagagatagtacaaagttggatgccgctatatatatctcagctgcataaaaaaaagagcaaatatccagcataacgttatcatttttcagaaaagaacgcaacactagctaacacatgtgcatatgttgacatgttgatgcgtggtgtgtgctttagcatatagggcttaggagaccttgggaactagttatacggtgatgcataggagagtatttcctgattccccaagacctgtgcttgattgtaacctgcttccagctcagagtctgtgaccaagtaaagcaaatgcagaaggaaggagggttacatagagcctcatcgattgtcataataggctaaagccaaaatcaaaatttaaaatttcaaacataattttgaaactgatataatgtagttcttttagcatttatttttaactcgtcaggaacacatatataaaaactttacttataaattaatttttattttataataaattaaaatagcttattaggaaatatgggtaatcgatgaggctgatatgctactactgctgtcggccggctggactagctgcaggcaagttcgtttcttgcacgtcatgaccatatttcagcaccgcgcgtgcggagcaaacggtcaatgactcagtcggcctcgtccgcattgttttacttttttgagaaataaaccaacggtatatttgcaatcgaaaataatttgtaaaatacatgttcttaacgatgtaaaaataaaagctaaaaaataaacttcgatgaaaataactcggttagcctcagtacgcaatgtttttaaggttaaaaataaaattttagctaataaacataaacattagcgaaaagatgaggttgctcgctatctttcgctgtcgagctacactcatcttctaattttacaattacttgtggtgtaaccaatcgatatgctatctatgtgtgaatgattgatcaatggatcagtgatgccgctgtgcagtagaacagaggtgagccaggggtactgttgggatacccgtaggttacgatagcttaatcaaaattttatatcgtgtaaatcaggaaccatacaagtattagatcatagatcgttaccactcgacaagctgcacagcggaagacgctgagaagttgaaggaactctcgcgaagtagcgggcgtcgatgtagaggaagtagtcgatcacaccggctcgaccttctcctcctcgtgctcgccgtactcccacgccgatcagcaccgtaaaccagcagcgcctctatcggtatccacacgtacagggatggaacgccacgcgcagatgtgctgcaccctcgtgcggctagggttctgctcgggaagggagtggcggctagggtttctcacgtgatgcaatatctccgccggtcacactcctcacgaatatataagatccattactcggacctccaaggcccgtaggactcatatttggattcctatccgaattaagctcatattagatctccatccaatccccttattccggcccattaagcgtgcgaccctataggttcatgtacactcggctataacccgaaaactctttttcggtccacgcatcaacagcggcccctagcagaacatattgagccaccgggcatacaaaaagatcatatcgactgaacctctagtgtatacttatatgaacccctttgcctcacgatatcgattaagctcaaggctagatatgtgccatcctctaatagctcaatcattcactcgaacctgttgatagattatataactcgtgattgactcctcaatcacctttggcatggccatgcatttccataatctacaacatcgaagggcccagagatatttctccatagaaggggcaaatcccatcttgattattcatattccactacatatttcatagcatacccgaaaactagttttataactacccaattacagagtagcgtttagcaatccctaagtaagctactacacatgttagctaggaaccatgataatctaaggattcaacaccaacactaaatgagatcactgatgacacaacacatatggctcttgcagtgtctcatgttggatctatccaacaacatgttcaccaacatgtgtccacattattaatttgttatctctataccatgatccatgagacatgatcattaattaacatatgtgctgatcatctaaatatatttgttccacatatgatatttgatcaggaatcctttagaaatagcaacacacaacataaagagtctcatgaaagaatcacatatttattaaccaataatgagttatctatttcaagaaataaagtcggataaatatataaacatagtatgtgatacaatcatctctatgattgcctgcagggcatatcactgacacttcggtccttccattccacggatcagctgagaattgattatttcaatcattaaactactctgaaactttacccttttttttttcttttgacaaactcacgatcggcaagttccgtggacttgtgcttgtggagtagtaaatcgcagcgacataatcttagtacttgcagattaattagggggaaggttgatgataatttaactttggcatttgtacagtacgctttctcaatatattgagctggtggcatcttaatatgtgaaagcaccaaagttatctcaaagagaatgagccacatcttctaaaatacgagtaacgtttgataaaactgataaataaaactacaccattagatcatatatgagacatatattggactaatcaggaggctcgcacaacttttatctctactctttttaatattatgtttgattaattaatcggttgataaataaaggaaaaagaataaaagtgacctcaaccttgaattcataatggagttattaatccctgtgattatcattaataatgtgatttgctgcaagattaacaagagagtttatttccctggatggagcacgtacatatgagaagtcgtatattgtatatattgatcactggacgtcaggtttaaatatatatgtatacgtttatgtgtaattttcatatgtttccaatttacttttatagatataccagctataatgtataagcgagtttataaatattatattactttcggtggtatgggagcacacaatagcagagtgccatctatcattgtgtcaattttattactccttccatctcaatatattgctgcctttaacatttaaaatgtgtcctaaaaatatataaatagctaattcacatattccctcatcccaactaattacaaccatcaagataaaaaaaactacttacaaccatattatatttatttctttttgtctattagttttttcagggcaattgcatttttgacgctattttgaggactagctactaatttggcccttcttttttgagtttgacccatttgaccctcttttttacaaggaaaaaagtacgaattacccccgaactatcgcggtcatccgaattacccccgaaccacaaaaccggacattcttcacctccaactatgcaaaccggacgaattacccccctcgacccaatccgcggtggttttggtctacgtgacgtacacgtggcagtccagtcagcaacttatttattaaaaaataggtggccccacctgtcggtttttgtatctctcttctatctcttctatccctcactcactctctctctctcttgtccttcagagttcagacggcgacggcgaaggcagcgagcgtgggcagcagcgaggtgaggcgaggcggtagccgccagggggctgcgcgccgcggccgcgtcgaccacaggggcctcccggtggatggcggcggcgcgagacaagggagcggcggatgggcggacggcggcgcgcgaggccgggcagtaggcaggcggcggcgcgagatgagtgggtgggcgctggacggcggacggctgcatgcagcggcgcaggcgtcggtgaatggcggcggtgcgagacgagggagcggcggacgggcgaacggtggcgtgcggggcagggaggtgggcagtggcgagagacgaggcggcggcgcgagacgagggggcgggagctggacagcggaggctgcatgcggcgacagcgagtacaagcaccgccgcctcgtccgctcccgcggcgccgccaccaccgccgtggccggaatcccggggttccacttcgccaccatcccggacggcctaccggagtccgacgccctcgcagctgcccacgctcgctgcctccgccgtcgcccctctgccgtcaccaccgctggacctggaggaagaaggggaaaggaaggggaggagcggctgcggcgaggggggagcagaccgcgagccacgggaccccgcctccggtgacgccatgctcgcctcgcgctgtcgcccaccgcccgccccttcctcacagcgtgccgccgcccaccgccgctcgcgctgccgctcatgcgcgccccgtgagagagagagagtgaagagagaggaagaggggaagggtatgtatgacatatgggtcccacaattttttaaaaaaaaatgctgactggattggcacgcgtacgctacgtaggataaaaccgctctggattgggtcgaggggggtaattcgtccggtattgaaagttcaggatgagcaatgtccggtttttaggttcagggggtaattcggacgaccacgatagttcagggggtaattcatactttttccttttactaatgaagatgagacttggccctattccatgaagtcaacatgacggtgttaactcaagacaaatatgtcatttatacccttgtgaatttaacctggtttcttaaagttttttattcaatgcagttttgtgcactaattagtatatattaaattgcctcaaacagaaatacatggcacagatttatgtgtaccaaaaaaagaaaagaaaaaaacatgttgacaccgcgccgccgacggcaaactctcaagcccatccatgcggagcagccgcttccaccaatcctccctccgaccctccgcgagccatcgtcgcctgcctcaccatgcgccgccgccaccggtgttccctccctccccgcagaaccgcctcctccccaccgaagtccgccaccgccgcgccgccttcgccgaccgctggagccagatccatcgcatgtgcgtctcggcgccaccggatccgtcgcctcatcgccgagcctttgccggatccaccctgtcggcgtcgcccctcctcctcctcgtcgagccaccgccgccactccttcgcctcgttgagccactgccgaccctcctcctcatcaagccgccgtcgctcctcctcttcgttgagccactgccatccctcccatgccgctgtcgtcgcagccactcctccacctcatcgagccgccgccgaccgcagcgcggctgccgttgcacaaggagggcagcgggaggaagttgctcttaggccgccgacgtcgctccctccctccacgagccagcgccgtgtggattcccccgctccgcgccctgcggccgctgccacggccgctccctccacgagccgccaccggcactcgccgagagagagatagacgagaaacggggagagacaggatagataaggatagggtttgttcgatggtattttggtcattaagaaaagtaattatatttcattcttttttttaaataaaaacttaatggtgctacggaaaaagggccaaacggagtgtttgttttaaaaaggtagggtcaaataagcaaactaaaaaaaatagggtcatattggtagttaggctttaaaacagggtcaaataagcaattgtcccttgaagataatattatatgtctaatcaattaactattttataaacttgtaatttttacttttgcttttaccttttataatagagtaaattttacaaaactacatgatttatggttcaagttgaagaaaaccacacacattttgacacttggcacttaagtacctatattttggtagtttagtttcacaaaaccacagtatcgatgaatggatttacccatgtgatgacgtggttgttacatctaggatgatgacgtggcatatcctattaatttcgtgcgatggctgataataggatcacacgtcctcgtcctatgtgaaacaaccatgtcatctcgcgggtgaatccattcattgatagtgtggttttgtaaaactacactaccaaatatatgtaattaagtgctaagtgtcaaagtgtgtgtggttttctacaacttggaccataaaacgtgtagttttatgaaatttactctttataatataattacaacgcacatgctttagcttgtacttagaggtaaaatgcagggtacgtgatttcgcccttaataagtcaccgtttgcccctagtcaggatggcagctctgtgggtccaaaactatggaattaaagaaatgataaagaaagaatccaatgatttacggtatatgaattgacctttctatccctagttatatctctcacccaaaaccaagtgtaaactgttcgggccaagtgcggggacgagttaattccaggttgctaatgttctttcacagaaccatcttcatttatctcttttcagtgctacctgtgtcctgtgggctgtggtcgtacgtttggagttggggcttagatccctatgttttagtgttgtttgaaactgatgaagagataaagattaagctgacgtacgtaaaacgaaaaaactttaacacatgattaattaaattttaattattacaaacttaacaaatggatatatttaatattttaaaacaatttatagatatttttcgcacgaaacgtatcgtttaatagtttgaaaagtgtgctaaagaaaatcaagaaaaaaatctttatctcaccgagataaaatttgtctatgcgctttccgtctcagttggtagatattttcgaagaaattaaactaacaagatgcgatactcaatactcctatctgcagccggcagccccgtaaagaaaccatatgtctagtattaatccaatctgcaattcaggctgaaagttaccacatatactatatatatatataggagaggctggtatatatgctggtgctggtgctggtgctatagcgtatagggcttagaaggcatcgggtactcgacgtgtccatgaagatatgtttggccatcgcattttttttcttccataactctgcgcttctagtaggagtacacgggttgtggcatggagaaaaaacagattaggcaaaaaagaaaaaggttaggaaagagggcaatatattttccctgagctgcaggtgagtgtacaattaatctggggcttcagatcgattcccttcactgtcagatcaaataggctcttgtacttcagcactaagctttgtgatttattggcatcaccgtcgatcgaccgtcggcagcctcgaagctatcctaagtgatcgattgtagtgatgggcaccactcaccatagagatctcagtttgcagatcgatcacttaattagagcacatgcaaaatatgtaattgcatatatagaagcagctaatcgattatagaaatgggattgaagcaacaaatcttgcttgttcacggaagaacatatattcagactgaatgactaacttgatataagatcttaattgaacagggagagctcctccctccagctattgtagacttctcttcaacctctttcctcttactgtttgcgcgaattattttactccaactatcttagatttcgtgttctcttttcctagtttggactatatttttaattttcaattactcactcaaagcaaaaaggaactgctacttgttgtattaggtggttttgtagcacaatctatcttaatatattaccaaaagaggatagaaaggagatacatgttcgctccgggtccctataaattacaaagttaatagaagaaaatgagaaaaatgcatcattcgatattggtagaacgaatttataacattagatattaattgatagagttgcatacaaaatgcaattgcatttgcagaaaaaagacaaaattatataccagatacaattagggaaaatcgcattatcagttgcacaggattagctaattatgtacagggtttacactttcggaaatggctgaatttttttgtcatttcagtggtcaccgaaatttcgtgaacctcgggattactggaacttttttgcacgaaatatttgatattgtaacaaattttaattgaatttgactaaattttgacttttttttaaaaaaaatggacaatctgagaaatcctggagagatagttgcttggtggtcggttgcttgatgtatatggacacacatttgaagtattaaatatagactaataaaaaataaattacagattccgcttgtaaactgcgagatgaatctattaagcctaattaatccgtcattagcaaatgtttactgtagcaccacattgtcaaatcatggcacaattagactcaaaagattcgtttcacaatttatatgcaaactgtgcaattgattttttttgtccacattttatgtttcatacatatgtccaaatatttaatatgacagaagaaaaaattggaagtttgaatggatccgaacacagcctagcctatgtaccgatttatcggccttcattttctctctcccatgttatagtgtgatcttgttgcagacttacagttgtggttgcagtagtggtacatatgcatgatggcagtcaagcatgtcgtgttctggataatattgttgaacgccccgatatatgttgaccgctctgtttagatcacgaaaagaatatttttaagtgtcacatcgaatgcttgatcggatattgaaatgggtttttggacatgaatcaaaaaactaatttcataactcgtctggaaaccatgaaatgaatctagcctaattaagccgtcattagtatatgtgggttactatagcatttatggctaattatagactaattaggctcaaaagattcgtctcgctatttaccgtataattagttttcgtttttatctatatttaatgcttcatgcatgtgtccaaagatttaatatgacgtttttggaaaaaaaaatttggaaaataaaacaggcctcagtacggctctacctattgaaagcatatttctccggctatgaagtgtagctagttttatctgctttaacagtagtttctttgtaaactccgtaatctgttatgaacctttcttttccattaacggaagagggagaagaatagtttcaatgttataaaaaaatccagcgtgaacaagaagcgtcttgtgcccatagtagaaaaaaccggaccgaacaggcagttcaaccggagaaaaccgaaaatagaggttggcatagttcggtcgaatagaaagacaggacatgcaattgaatcgattcagaccactttaaccggcaggttttatgatgaactgggcaataaaccgccttcagtcggaccagactaaggcaagtcattgaatgaatgggcgacaggacagcctagttagttcttaggctcgttttttgggccgcacttgttttttttttagcaaaaatcaaatgaaaaggtgcgttggtggggagtcaacccgtggtcaagggttgcaaggcaactgccgactgccgtagccatcctaccagccagatgtttgtattgtaaaatcaaaggtgtttttgattattattgtgtgatgaacaattgggcattggaaattattggttttgttatttggaatttattcacgaagtggttttggagatgattggattcataggtgatcgcaggattttattattttatgtgaccggtcagaccgggctgtgtatgccggtcagaccggcggtgaccaagcggtcaggccggtcagactgtgtcgttttcggtttcgggttatttgtttggatatccgtgattatttcatgattatggcttctagatggatactatacgtatgtaatactgttatttgctactaatgagtcaagttggagatagcttggtctcggaatatggtttctttgtttatttcatgtgtaggtgactcgatgcctcgggagagtatttgcggtgatggaccgggagtcggcttggggataagacgacgtccgtggtggtcagagatcatgcgggatacttaggctagagttgatgagcgtggttgatggagattccatatggcatacgatggaggtattgtgtgcgtatgggatgcggagtcgaatttggaaggagtccgaatttgatatgattggttatgtaaagtttgtttcttgtactagagggttttctaaggtgtttaggactcctagtatgagtttggttcgtggctttaggctctctacctcgagtataaatagagggggagcgtgaggcttcccggtatcgctttagagagcaattgaattgagttttgagttagggtttcgagtttagtcaaaatttttgtaaggagtgctgttggtgcactttgtaaacacagagagaatcaataaagtcgtcatccactttaagagttcttcgatttgtgtttatcgggtttcggcggtctaaccggcgatctaccggcggtcaaaccggcggcaagcggcagttagaccggcggcattcgggcggtccgaccggcggcggcgacaggcgcggcaggcgacatcggtggtcaaactgggtgatctataccagtcagacttacgacatccacacgatcagaccggcagatcgatctccgtcgatttcaagggtaacttttatttccgctaaaagttttcggtttttgggtataccaaccattcatcccccctctggttggcttagttcttgtgattcgatcctacaagtggtatcagagccttgttttcttctttggatttttatcgatctagagtttttaccatggctactcctgctaagttttcaactaagcctcatgtttttgatggaaaggatttttctcattggtgtattagggtgcaatcttatattatggctgaagattatgatatttggagaaaagtttctcatccttatgtgattcctgaagctattaatactgctgctgaaaaactgcttttgaacaaaattgcaaagctcgcaacattcttttgagtggtatttctcgttcggattatgatcgtgttgcgcactttcgaactgctcatgaaatttggaatgctttgagtaactttcatcaaggaagaaataacattaaagaacttcgtcgtgatattttcaaaaaggagtatattaaatttgagatgaaacctggagaagctttggatgactatctctctaggtttaataaaatttcgagtgatcttagatctgtagattcttcttatgatgctaattatccacaatatgagatttctcgtcactttttgaatggtcttgatatgtctatttgggtgatgaaagttacatctatttaggagtctgttaacatgtctactttgactttggattcactttatacaaaattgaaaacacatgagatgaatgttctttctcgaaaagttgattctaagtcgagtgctttggtttcttcttcttcctctttggatgttgatgcttcttcatctaaatcttcttttcttactgtttttaatgccacatccgatgatcaactcgaacaaatcgaggaggaggatttggctttggttgctaacagaattgctcgagctatgaataatgccaggaacaggaaaagaggtggtccaaatcattgctttgaatgtggttcaattgatcatcttcgttcgcattatcctaagcttgggagaggcaaaagagaagacaaagatggtgagaagaccaacatcaacaacaagccgaagggttcatcccaagggaggaagctggacaatcttaggaaggcttttcaacaagtttgcgccgccttcgagccactaagtgatgtagatggtgaaagtggagatgatgataagggaaagaacatctccgatgtttgcttcatggcgcgtggtgaatctgacacagagtatgaagataatgaggtaggtgcttttgaggaagctattaatattttgagtgcaaaaaataagaagtgtgagaagatgtatagaaaacaggaatttatcactgaatctcttaaatctgaaattgctagattaaaatctcttattcctaatgatgataattgctcaaattgttaggttttaatgaatgagatttcaaaaattagagatgttaatgctgcacatgatttgaaaaatagatcttctcttgcttgtagttttgctttgcacacacgcactttggatgagtttttttaactaaaaagttgttgtaaaaatatataattgcttttcatgctagattgatgtttaacatgatttctgctaaaaagttaaaacaacctcatgatgttttcgattgctcaacatgtaatttgaataagttgaaattgaaagatgctttaggtcgtgttgagtacatggaagatgttgtgaaaaacaatgaagtgctttcttgccccaaatgtcataaaagcaaaagtgtcatggtagattgtgaaaattgtgctaatttggaaaaaagaggtttcttatttgaaaaattctttgctaagattttctgatggtaaagagaacctcaacatgattttggatcaatcaaaggttagcacacataaccgtggtttagattttaatccttatgctcataattctagacatcctcctgttgtgttaggtgttggtgctagaagtggtgagattttggttaaacctgatactaacaaaactgtgtttaaatctgctggtatcatgtctaccttgaatgcatcttcttcaaaatctcctgttgttgcttgtgttgctaagtcttctaattctacgaatgtgtctaatcatcgccaaaaatatacttgttccttttgtggcaaagatggacatattgttggtttttgttttagattagcacataaacagaaaaaggagagagagattgcttttgcaaaatcaaagtggcaaaaatctggttttccctcgaggaaaccggtcagaccgcactaggtcctgcggtcagacctgctactgagcatcggtcagaccggcggtacagaagcggtcagaccggcccccggtctgaccggctgctgtacctcggttagaccggcctcggaggaatttttctgaaaattctaaaattgattttgcacatggatatatgcctattggatcttctggtcgtatgtctcagtactggattcctaaatttttattatcatctaaccccagtactgaggcttcaacttctgcttctgtgtaggctttggtggcaagaaaggagaacgtgtggatcgtggattccggttgttcgcggcacatgaccggtgtcacgaccggaattaacccaacgggcgttccttacgtgcgtgtattattccttgtcccaggaggcaaggtacaccaaaagttgatacatttcagagtttatcaagcggaagcgtaaatagttaatttattatatgggcggcgaaggcccagcacacacaaagacaaatgggaaacagcggaagactagggcaatgaccataggcgcttgacggcaagcacgagctagacaccaaagccttcatcttccaggggttcctcttctgggtttcggaaaaattgagcaagactgagtacaaccaccgtactcaacaagacacacccacaagtgcaggataaatgcaagggagtacaagggggttataatataaagggttagggtttgcagtaaacagcattaagagacacttagttgctcaaagctattttgtaaacacgattccagagctatacgatattattaatcaaggccgtgaacccacacgaacctgccttaacccaaggtctacgatgattcagaccgaactggcaacccgaccctgggtcccagctcgtcccaagccaacccaggccaaccattccatattttagttgttaagctggttttaagaattaaaacactaacttgggtacattgctcggcatgcccataaccgagggcgcggctattcgaatagattatactctgatcagaggtgtacatctttacccacaagacacatcttcctcacgtgtaatcacgtgccacataccaccacggtatacggacggaagacgtgacatagtttccaacccatcctagccatagacaagagtaccgacccaaccccacctacggccggaacccccgggacaggtaggcaggactgaacccctagcagcaggacaccggccctgtgccatgacatctcgactaccgggccgcagctcgtgtagccttcatttgtcctagagatatccatcgacccccgacttcgtccatctccatccgtgtacttttgtttataaccagactgagccacaaactaagccttacccactagacatgtggaagtacggtagtgctttgcaacagaggcccgaagaccggtccttatatggccgaggtgctaatatcaaaaccatgcaccccgagcccagcctaaaaccattttgaggattttgaatagagggggaggtgtgaatccaattccacaataatccaaccattccatagtgtccaggtgatatgaatatcccaaagtctagagttgtaaaaccacctaatgttgcctaattaaccagcgaagcatctacctaaaatcatactagtggtactatgagtagagtgtccactagttggggttttgtttattctagggtgaataaggaaataataacaataacaataataaggtcataacaaaggtaaataggcatggctagataaaacagtaataacgcgggaatttaaataaagcgataatgcaataattttaatcaacataattttataaactgggattcaatatgttcaaggatgatgtgacttgccttgctcgctttcccaaacgtcggcttcaacttccacgaagagcggatcttccgaagctgcagcgtctagacgaccaacggaaaagaaaagtcttttactctaataaactccatataacaagcaggaacaaagcacaaaaatgggttcttgacttcttaaggaaaaattagagacttgaacggtccaattccgaattcaaatggccaagttatggccatttgaagtttatatgctctttaaatgaatatttgcgaatttcttcagttaaattttaattttaaaagggtttattgcgttagccgaggggagggggcgcgtggaccgggtccacgggagtggggcccacgcggcagtctcacggtccacggtggaccgggtgcactcgggctcacaccggccggcgccgtgggtcccacgcgtcagccgcacccgagggcgcgggcggctgacggccgggccccacgcggcagccgctcggtgcgcccgaaggcggccacgtcggcgcggccggcgggaggcggcgcgcccgcgcccctatggtggccggcggcggccatgggcacatcggagcggcagccgagagaggggagggaaagggggaaacgaggcggtggtccaaggctcaccctaggtcgacggcgacgacgaaaaggcagccggagcggaggaaggcggcggcgcggctcgggtcaacggggacggcggcgctccggtggtcgacgagcgaaacggaggggtggacgaggtcggcgaggatgcggcgaagccgaaggaggcagcgccgaggtgggaggtggtctggggcgacgacggcggcggaccggagctcggcggcaatggcggagagagagagcgacggcgcgagctcgattccggcgaggtggaagggcggcgagaggcggaaacggacggaggaggtgcagggagtgtttaaatagggttggaagggggagagagcggccggcggggaaggaataggcgcgggaggtccggccgccatcaatggcgccggcgagatttgcgggggcaaatccacccgtttgaacgcgagagagagagggaaaaatggggggaaagggagaggggatcacggggagtgattttcccctctttattgcacgcggggacggctggaggcggtgggattcgcggcggcggcggcgctagggcgcgggcgaggcggcgggagcggcgggaggaaggggatgacgggtgggccccacccgtcagcgagggtggcgggcgggcccgcccgtcagcggcgcgcgcgcggggagaggccggatgggccgcggggagaggagagggagggggagtgagatgggctgagccggcccaagagggagagggagggaaaggggactttttagagtttttctttttataaaatcattttaactttgtttatttcttaataattattatttgtgctctgaaaattgcactaaaatttatttacgcattttaggcttttaggaaatatacaaaaatcctccaagccttatttaacttttaactttgcacattttaattgttggaggctttcacacggattttaattattctaggcataatttagaggatgtattttagagtccttttgggacgtgacaaccggtgataaaaattggttctcctccctcaagaaggcatgcaagactgaatcgattatctttggtgatgcttctacatgtgccgttctcgctacaggtttggttaaagtaaatgaaaattttgaattgaagaatgtagctttggttgagtgctgttggtgcactttgtaaacacagagagaatcaataaagtcatcatctactttaagagttcttcgatttgtgtttaccgggtttcggcggtctaaccggcgatctaccggcggtcagaccggcggcattcgggcggtccgaccggcggcggcgacaggcgcggtaggcgacatcggtagtcagtccgggtgatctataccagtcagaccggcgccatccacacgatcagaccgagaccaatttcggtcagatggatctccgtcgatttcgaaggtggtgaagtggtggagacgccgcaatcggatgcttgtcccagctgcagttgacactccatttcctagaaccacaagcggccatcaatctaccttcctgtttgagttccggccgactgtggttgtgtggtccagtgcaagcagttatcgacttggtcgcagtgaccatctagtcccctcaaactcgtccaaaagatgatcgacttctttacaagttggtggtactgaaactaggaatgaaaaatttaatttgttataaatttgttttccaacctaaaattgttttccgttttaaattttcttagcctatctatactgcagcgtgacaaatctcttatcgaattcaacgctggttccgggcggacggccctgcctcgtggcgtggcgcggttcgaggatgtaaacgcgtgccataattttcgtggcctcgctccttcaatctcgcgactcgtatggcgcttcgtgatttatctggcaggtgcgatagactcatcgaccccatagagtgtcggcgtgcagcccaatggtccaagcagccatacaagcatgtaagccccaatgaaaattttgacagtgcaaggccctttttttttccctttggctatagcagtaattttatacatcagggaaggagatgcatttgtgaaatttctgaacataataagcaagctttcaacagttgattctctatcatcacatgcttaaccttcttctgaaatgcatatggatttcccactctgctaataagaagcagcaaattcacttaggttgtgtttagatccagcggtaaaattttttaccgtgtcacatcggatatacggacacacatttgaagtattaaacgtagtctaacaactaaacaaattacagaatctgcttgtaaactgcgaaacgaatttattaaacctaattaatccatcattagcaaatgtttactgtaacaccacattgccaaatcatggagcaattaggtttaaaagattcgtcttgcattttacacgcaatctgtgtaattagtttttatttttgtctatatttaatacttcatgcatgtgtccaaacattcgatgtgagtgtgaaaaaacttgccagggaatctaaacagggccttatactccatccatcccatttgaagtgcagccatgattttccgtgctcaactttgatcgtctgtcttatttgaaaaaaattaaaaacataagtcacacatatagtgctattcatgttttatcatctcataaaaacaaaaatactaagtataaaaaaaattccaataagatggatgatcaaatttgggcaaaaaaaactcatggttgcacttacaattggacgaggggaatatcacaacataatagtgtttaagaatttcatttgaagtcctcctgacctgaatgtcaaagcatgctgcctttgtaaaaaaaacacaagatttgaagggattgtgagcgtgttggatattaaacacgggacctgggggttgagaccatatacctcctatgaccgcatatcaagtgtatctcctatgttgcctttgtgacaatttcagtgtgtcctaatcagtaaataaggaaaaacatttgtcagttgattgtttgacatgtttacataataaagttgtttcttcagtagcttagaatttaaccgaccaactttattctgttcactttgacaatagagatacataagatagccggataggtgatgatggatcatataatacttgaaattaacaatcaagacacacattacttggcaattgatttggtagcatagaaataccacaggttggaaaatgtatattatatgttcctttcaagaaacagaatgtatcaatgctatcttatttcctgataacttggtttcacagtatagaatgaattctaaaacgtttagataatatcacataaaatgagtattgcacggtttataaaaccactagtagaaagcgcgtcaactagtgtgcctatcttatattctaatgctgatattgctagcaagctttgattaggccacgtggtgcctttcccttagcaaataagtctctagattatttgagagaaaaaatgacgccaagacatggtcactttgccaaaccatctccagattcccacgttcggctttgtggagaaataaaaagattcgtcaagaaaaaaatccgtcgagaaaaacgatatgcacatactatactgcagcatgacaaattagtagactattggcaagcatgcatatattagtaggtgcaactaatgaaattcgagtccaatatcccctacatactccctctgttccataatatagggcgcaactgattttttgaagtgtaccagaatatagggcgcccatgcacatgcaagcaagtagcattaaaacaaaagtatgctctggtcgacttccgtgcgcatgcatgcaaaggttttcaatgcgtggagttggctcttcatttcttgcatgttgcttacggcctctttctttcttttggttgctttaaagctcttggctcactggccggactccatttacaagctcacttgcattagttgtaacacatcggcgagcaccggcgagcagcgatggatatggcagagaagatggtggagtgcccggcgagcggcaagacgaaggccaggagttgccggcgcatgcggcaacaagcagagatggagttcggtcgtgcgcgatcgattcgtgtccacgccatccgaatgcggtagcgtgcgcaaatggagctcagccgtacccgagtgctttgcgacgccgccgtccgcatgcggcagcaagggcaaatggatatagctcttgcgcgaatggtttgtctccacgccgttcgcatgcggctgcaggaggagcgagctaaccacgtcaatgattgcgaggacagcgatggatgccgaaacctgtgatgacagcgtggttgaatcgacgatcatgggcgaaggtctcgcggccagcgctgatcatttaatcaactccgacgatgtacggtatgttattgattcactagcgaacgacactattgttccatattcactcgaacagaccgatgacaaggaagacagctagaattattgtatctgtctctatggaaatggcaaaactaatgttccctgagtatgttgagagagtatgcacattttctaatttgttcaagatcagttctttattttcatattgttccatcctctatttttttagttcggttaaatgcaagttctttttgttgaagataaaatgaaatcaaacatgaatactccatttttttagttgttggacaaagcacagttacaagagtaaaatcctaagctatgcattgatgaaatccaatgcatcaagatagatttgcttatcacattgcaaccttattggcagcagaccattactttccaatgttcccttcttcagatgtgggatggcataatgttgccctccttttgcacgcataatctctctcacgcaaccctgttgtgtgagaaacacacgatttgatttatccaccggatattcttcatatgctttgatcacatttgtctcaatgtcttcgatgcttgatggagatgacttatgaaacaacgactgcagggctgcaaaaaaacctagatccaaaacattaagatcaggagaattgggcggttgacatactaatcatatatcccacccatcttcttgtgccgcacctaagaattctagatcgtcaacagcaatgtgtgtcttcgcgttgtcttgttgaatgtagataggaagtccgcgttcctcgataggccatttttctttgatggcgggcaagatcttttcaatgaggtagcttcggatagcgtccctcgtgaccgatatcatggccttcaactccaaggttcctacattcaatcgagtaacaaagattaatatggttgtgagtagtagtcatatttcaagtaattaagaaaaactaaacaattcacccctctccctattgcgacttctcctctgggccggctgccagtaagtgaagggaaaaatcccaatttttccatcaaatatacatacgccatgctcatcaaaccttggacgagcttgcgctgctataaacattaccttatcaatgaaaccactgttcttttaggattctcttcgtcattgcccaagtaaaaactctggtctacccttgtcctataaaaccatttctcatctatgtatatgacgttatacagagatttgaaagttgggtcgtccggtatgctttagctatcaagcatttgtatgcaaaaatgcacacgggccttcatgttatcttcggtcagggtgaactttatggcatttgtatggcgcctaaacaatccttccttcaaacgcctaaacaatgtggcttttgccatatgcaaagcgttggccaggtcacggatgctatggcgttgtccaagcggcacatctttgatgacactaggatcaaacggaagttttttgtgccacaatacttcttcttcttggactcaaaagcttcaattccatctccaatctgtctatgtcgccatacgcgttggacaactctcaacggcacccccatttcattagcaactgactttgtcactccctccttcatcatgccaggatttgatttctctaataacttggcatatatggttcgttttacatcaggagggtagtgcctcctcctcttgatattgatacctagacatggttgatgatgcttagtacgtgcatatattacagtcatgatttgcatggtttgcatagttttgtcatgtttactcatggtatatatcgaccgcgatcaagcaacaacaacaagattactcatggtttgcatggtactgtgcatgcatagctacatgcaaaggctcatccagtaaacaagctgagcaaaaaaaaacacttaagtgtattacctgtgccggcgtgtgctccaccgccaccgccgccgccatcatcattgtcgccgtctccgccgccgctgccaccgccgtcgtcgctgccatcatcgttgttgccgccacggctgccatcatcgttgtcaccgccgccgccgccatcatcattgtcgccgcgggcggctgtgttgtcaacgtcttcgtgcccaccttcttcatctgaccgatataacaaactagatcatcaagcacatacagatcatagaagaagatcgaaacactaggtacataagagaaaaataagaaaacactagcagcaaccgtacacaccttcgttctctaaatagcaaacataatcgtagttcaaatcaagtatttcaccctccaaatcctcaacttcatcccaattaaaaggttgatttagatccaaacctgccattgtgttcaatcatgggaggaaagctgagacaagcttattgtggaatgaatgtctctcaccatatttatagaacaagctggcgattagattagctcaattcaaattttcgttgatggtgcgttcgaaattttcgttgatggcgcgtccaaaattttcattgatgcattccattgatgatgcctccaaatctccaagctatttttacgtgcatgcgttcgcggggtctttcgcgcgccaaaatagctggtcgttcgtgggggaggatgcgaacagatgcatgcatttaaaggcagatgcgaagggctgcatgcatgctgcacacgggcagagcaaacgttgcatgcgtcgtcacccgagaaaatagttacgcctccttggtattagggtccagagcagttgcaccctatattaaggaacggagggagtaatactcatctgagttacttcacaattcatcaattgtcaagtagtacgttgcctttactgaagaagtatccatagagtaaataaggcgggagtaaaaactttattataatattttttccttctatcattggatggcctttcttccgggaaaagaaaagtctaggagcactgactcaaatggcagcagcatgctcccagtgacattaataggtttcagttagtgtcggtacattgattaatctgggagcagtataggtactgggtggaacttgggagcccgggataccgatcacaattactgaaaatcacaatgaaatgtgaacatgctatggcactcccaacccacggtgtctataggtagtgtctaaaagagagaaacaataataaatgtatttgtagacactacctccccaatgcacagtgtctatagcagtttcttaagagaagaaaatttaataactatttgcatgtcatgtaaacgaaggatcaactgtgacacgcatcaatacatacatccatgtgacacgcatcaatacatacatccaaatttgaatatcaatctacataatactgtagtgccaaatatcaaaacatgaacatatattagtgcaaatcacattatatgagtagaaactagcagatatcagtgcatatatgagcataaagaagtagcaaattttcaagttcatccatctcagtacaataaaaaggaaaaaaacatataggtagccaaaatggtaggacccaaactggtagccgaaatagttggactcaaattagtctctgatgacatgagcagttcttctaggtgcactgcaacagcaaaccaaagaaacatatgtaaccacaagtctgccacacgcttcgacagcatccaaacttgatccatagcatttcctccagcagcacagcagcaccaaaatagcaggacttgatctacaaaaaagaaaatagttggcaaatcaatatcaaaataattcagaagctttagagcaagaaaaataagagataacatatttagctaaactggtactgctaggctaaaatgtaacagagattgcaacttaaaatgaaacatactagttattggcaacacacaaattgtaaattagactttaaatgattaacaatcacctaattagtttgaattcctaaagttttgctagatatgctcaatcaagtctgattgaagtagcttatgagtagtacgatcatgaataataacatttctttgtatcacttcttccatctctaggttaggtccatgcgagattgtagcttctaatacagttgatgtgcttgatgtctcattcaaatcaagaggaagctactcgatgtctttctcatcttcgattaccatgttgtgaaggataatacaagctagcatgatattctcaagatcaccttgatcatatagatgtgcaggtcgtttcaaaataccaaagcgagattgcaaaataccaaaagcacattcaacatccttccttttcccttcttgatgttttgcaaacaacttgcgcttttcagattgtggatgatgtattgacttaacaaagacaacccattatgggtatatgccatttgcaaggtagtaacctgtgttgtatagccttccattgacatggcactacacttgaggaccctcccctctcagttgctggatgaacaatggtgattgattaagcatgttagtatcattgttggatccagcaacaccaaagaaggcatgccatatccaacgatcatgtgaagctactgcttctagaatgaccataggaacaccttgatcaccacgagtatacattccctaccatgcaacagggcatttctcccaatgtcagtgcatgcagtcaatgctccctaacatgccagggaaaccacggcgctcatcaatctgcactaagcgttcaacatcttgcaccgtggggcgtcgcaaatactctgcaccgaatacatcaatcacacccttcacacacatcttcaagcactccattgtagtactatctccaatctttagatactcatcaagctgatctacagggctaccatttcccaattggcgaatagccgatgtacatttcttaagtggagataaccctgggcggttaagagcatccattctcagtgtgaaatatttatcccactgccctagggcttcaacaatgtgtaagaagaggtgctttctcatcctgaatcttctctaaaaggttgtatcattatagactggattctgtacaaagtaatctttcaatagcccttaagattcttcataaggcctaaaacatacctccttggaccactctgcatagtaggtctcatatcttgtagagcttcaacttcggcttcaattcggctactacatgattagcaagatcacccagtatgctcctaatatgatccaatgggtacagatccattggatctatgctactcacctcatcaagagaatcatcatgcgcaggggaatcaccatcagattggttcgacatggtgttaaggatgagagaagatggaagagtaaagagggaagaaagaatgtggaaggcaggggagggggagaatgtgtgagctagaggatatatatatatatatatatatatatatatatatatatatatatatatatatatatatatatatatatatatatatagacacacacataaatatgtttgggtagtcaaataggttcacacaattaatggtgttcagttgcagtataaaaaatgagttcacataactaattgtgttcaaacaagcactagaaaaataaaatgagttcacacaatatatagtggtcagttgcagtataaaaagaggatgcattcacacaattgatagtattcaattgtagtataaaaagaaaatgggttcacaaaattaattgtgttcaacatgcagtataaaataatgagttcacataattaattatgttcaaacaagcactagaaaaataaaatgagttcacacaattgacaaaattgtcacttgttcagatttgaatggtactgtcacaacacaatttgtttaccaacaatatattaaaaacatacctcaattatctttagcaaacaaagccaatctcatacactccaatgctttggatctctcagccaaagcttcttgactaagatcacttgtgggagctagcagtaagtctttgtaaaggtcaatcattttaccctttgtttgttcctgagctgctttatgattaaggttggctacttctagcttcttatttgccaaactttgttgtacctctcccatcttctcagcattgctgcttgcttcaatgaatttatctagtttgtggtcaataacagaaatagcgtctgatgtcagacgttttccactgcattcatctttggccttcttatgcccaataggacgttgttttggagcatctttgacattcacaacatgagttgggttaggagttacactcttgtccttttccttcttaattttcttcaaatatgtagaccactttttctcatgtcgtaatatcctccctacatgcaccattgtgaaacgcttgtcattatgttcagaggcatatagctggaatgcttggtccatcttttggtcttcactcataccactttgatgtattttagtgattcttgcataaaaaccgttgaattcggagactggtttcttaatgcgctctcaacgttgcttcaactgattacaatttctcatacggttactcttagtggtgttgttgtatgtagcagtaacatctaaccaatattgatttgacttcttatcatttccatcgatcgagttaaatgaattgtgcagccaagcactagcctacaattaggagaagaataaaccgtacctttaatgaagtgcaaataaaattaaaagcatacagactcaaatctttaaaaagaaacaaagaaaattaacataccaatctaatgtcttcttcatttgaccaattcaatcgcttctcggacctagcatcggaaaggctaaatggtgtcatcgtcctcaatatcaattgtttctttatcttgtgaacctatttgtgctgcagcacacctcctagttggtgacggtatcgctttagaacattgtagaataactaattggtgcaccaacaaagtggaaattttctggaagcttacttgcattatgatagttcacaaatggatgtgtctggctaaatggagagatcttattattctgtaaataattcaggaaaccacctggtggatacatcctgaaaaagaaaacaataaaaaaattatgatatctatgacaagaacagaagtggtgaaatacaagcgcaatatatttcagaaaaaaatcagtccccataaactagcatatatgagcttgactaagattaatcaggtgaatacaagtaattagcagtaccagctatacatcttgccaccaagcctagcgaaaaattctttgaagcaaaaaagtaccagctatacaacaatatattagcaattctttgaagcaaaaagttgtcagtctaatataacccattaattcaccaataacattgatcaacctaaatctttgcacccaaaaatttgcaccataccattccgagctatcaggagatgattcttgccaccatggactggcggcatgagcacctgcggtaggaaagccagcgcctggagcactagctcgtagagcaccacaagcaacagcagtagcatctggagcaccatcggctcccacaacactagcggcatctggatcaagggcggtcggttcaccggcagcctgattggatttggatcgacgcttcttcgattccgtcggattcatccttgcacatggcttgggagaactactttctcagggatgagtgattggggatgattttggctgattctagctatcacgagagagattggagaagacaagtgattggggaaaaaaggaggcaacaagatggatagagggaagcacgagttggtgttggcgcgaagaggattggggacacgccaaaaaatcgtgaggatttagcgtgggatggtggtaggcatggcggtgggatggaggcgggtgcagcagatcgggagcttgaggaaaatccggacggaagaaacgatgagttgcccccaacgctagtttctctcgtttcctagtcttggtgcttgcgcccaaccccgtctcgtgcatgagacacggtttctctcttttttcttctctcccttctttaatttctttgccagatttttggtatttcttacggtcacagataaaatccgcaagtgcacagatataccgatgtagcactttcccttacggagtattccaagggtatcgattccaagggaacgtgtgtgatcagatcttcctccgattcatccaaggacaccaagcaaatgataggccaggatagagaggatttattagtgagaaacagtgtctagggaaagcttaattttaatcctaacgcaatacttcaggcactggcaacccgctgttctcagatgtcgctctactatgtacccggacagggaggacttacaagtgatcttgagggctatcaccacctctacacccacctcaaacgtactgcgggatacacatcaattactggataacaattacctaaacaccacgtctaagcaattactatctactttagtgtttataactcaccaaagcaatcactatatttcagttaattatagtgaacaataatcacgtatgctatttaggaactaaccaagagataattctcacaagataaatctaaattactcgagaagaatattatattaaattcaaagttataaacagaataagaaaaataggagaagattaccgacaactccggaattcttccgacttcttctactctactctctttctattctagtatacaatatagtacaatagagcctcttataattcagctcaagcttggaagtgtgtgtgagagtgaatgaagtgaggtctatttataggacaggtatgacgattgtaaggggaaatgtccgaattgcctcgcaaccatcattgggagagcatctggagcgtccaagccaaacccaaggatcaacagtgatcagaggggttcggctgaacctgggctgggccctcctagcctggccttcgatctgtggactccctgggctcttctctgtccatttctcgcagttttgggttaattcactgatgttttgatgaagttcacaacccctccttatatggatacacatttctctcactatactctgattttcctcccaacatcggggtttatcatctgcatacaaatatataccaacacttatggaatatgtgagattaagcacctatcactatgttagatgttttattatccgaactttatgtagatgttggcggtatagaatcgacattttacagccgccaacacagatcatatttttgcttatgtggcagcctaataaattctatagacactaggtggagggttgggagtgccctaaaaagcttcggttcatttgtgcgtgttggggtttaggaggcatgaggaattagatgttcacggaggacatgcctggtctttcatccacctcgggatatggacgtggctttggctgccaatggcttccatagctcggcattgtcagtggcaacccctgcacgagcgggtcgtgtcctgtgtcatccaaatgggcagcaggagaatgcagaatgcaacggccggcattcatgcagcaaaatgccgcaatcttacgagagtggaaaatggctcgccgtctgtaaagattctcgtacacctcgctcacagaagtaccattcggcgcctatcactgtgtcagtctgctggtggtgctgcttggcatgtacatactggaactaaacatgatacaatggtgcaatccgactgacaatcagctttaattttctagcatttaacagtgcaaatttatacctatagatgaaacagaaatgggtatatacaatgtttggtaattaaaaaaacaaactatacatagtgcaaattgataagaggtagttgttgataaccactgaactcagaatacgtacatcaattcaagtatctagtgaaaaatgtgtgaaaaatacaaagttcacttcatcttgcttgtggtcggtttttttttttgttacggccgtttgatggttaattttgtaagaccatttttatggtacaactacaacaacatttgaggagtgccatgctcttccaaacccttcagacttgatcagtggaacgagagcatttcgatcaattcaatttgccttatctgcgttcttacaacaagaatcaaatcagatatcatagaagacaaaccacatgtacctaaaagattagcatgcaggcgaagtgagcgtagattacctggttaagttccttgtggaggaaccggcccacccgggttcaaatcctaattttgacatggctgctcgcatttaccgctaattatttgtcaatctcaagatatgacagcctagtctttcggaggtactcatacaggtagggtgcgcgtgtgtacattcatagatttgacacgggtgcttgcatttacgactaattatttgtcaatctcaagatatggcagccccttctttcgaaggtactcatacgggtaggattcgtgtgtaggtatttgtgtctatactgtatttcttattcatggtaatatgtggttggtgccctctttactacctctgttactgcatgtacctaaaagattactgatattactacgtctctcttttctttttttacatcggttacatggttagacatgtaagtgaaatggagagagtagcattgaactatgaaagaaaaaaacgtaaattttgttctaggaatctatgaaattgtgtaactttgttccctcctaaaattattttgccttccaaaaatttctaagctagcttgtctactgcagtatgacgattggtgaaacatgcgcacatataggtgtgaatctatctctcctgcatgcataatacccatatgtcagttgagctgcattagttcacaattaatctactttcaagtatactggactactggagcagtgactcgaatgtcagcatcacgtggaaggctatacttcaagttattcaagtatgaatgctctcaataacattactctctatatactatatataccgtacattgatttgagagcagaatatatactgccatatcgggatacaacagaattgcgctacaacctgaaaattaccacgaattagatacgagtagcatgtacaagggccaccacgtgctatgcaaaaggaacagaagcgtttgtgatcgattcatgttgctgcttgcttaattttgcttggaaggtatggggaatttagtaagcaagtgggatatggattgtcctgctaacctctctcttaccgtgtgctttttctagcttgtcctagtgatctttattggtttccagaaatgtattctaacactggaggggaaattcctcatatatctttttctctttaagtgaatgtaaacaactgtaaaaaattctatgataaaatatcatatagtaccatatatcacttcgtagaaaataagttcaaatgtggttgtgaataaatactgctactgctaatatgattggttcgtcgttatattttttaatgagcgagttgaattttgacttaagaaattgtggagtagaatatatgcatatactccataaatgttgtgaaaacttttaaatcttttataaccatttggatagcatttgaataaacaaaacgacatcccttaaggaataaaaagttttccttcctccagaacacggggaacaacacccgcaccaatacaatcctttgagatctttcatgaagcttggaaaagaaagacaacgcaagcttttttttttctttttcatgaaggacgtaaagcgttagcttgtataaggcccatgaaaaagagccaatgttggcagacacagggcctcaaaataaagcattggcggttaatatttgtatgtgttcgcgtggcttttgatgtttttattaattgcaaattagtgaatgggtaatctagcttcatgtcacatactactgatcgagtagagttaacttaaaatcaattaattaactaaaaacttattgacatgtgatttttttcctacttgattagagttgagagaaaaacgatgcgtgtcttttttttatttgccttcaaggatgcaaagcgatccacagttgatttaactgctcccaatacccgtcaaaaataaaagggaatgtctcctgaaaaagataattaggagtagttctttttctatacgctcaatgtagttgttgctactatatactagctactatatactccctcaatcttaaaatataagtctcattcactcataacacaaagacaaaaaaatatttaatcacatttttagttggatcaccttgatgcatacaagcaatgtgattgggaagtttgatgatataggatttaaaacaaatcgattttatagaaccataggtggtgctagttaatggatgcatgcatacacgccttacattataagacataagagaaaagtggttgtgccttacattttgggatagagagtaccatatataaatacatcttttatacatgaagagaacaatattgttatcgtaggtgacgatatagatgtatgaaattaaggccaagctgcactactacagaaccttccattagtgacggcctctaacatgtctagaattagcaggctgtcacaaggaagtcatcttaatcgggccgaaaaagcgaccgattgagatatgatcgcacagacatgctagataggcataaaactcaaacccgtcacgcataacacctatcagtgatgggccgtaatttaggcccgattgagataacattccatatctcaatcgggcctcaaattggagcccgtcacggataacacctatcagtgacgggccgtaatttaggcccgattgagataacatttcatatctcaatcgggcctcaagttggagcccgtcacggatgaccatcatccatgacggacaccaacttgaggcctgattgagataataactaggcccgtcacagaagacttattcatgacgggcattgtactaatgctcgattgagatgacataatctctatcgggctttaactaatgcccgccaccgatgaatattttttcattttccatatgaaatgtttatatttgtaagttgacatgtaatgaaatagttaactgcagtataataatttattttatgagtcaaaataatttttttggtagtaaatgacttcaaatggaaaaattgtcaacaacaaagttgtataacttatcaagatttacaactttttagtttggtctttttctatataacttttttttaacagtttgaatttaaattttaaaatatgacaatttcaaacaacattttcaaatactaaatgatttcaaatggaacaattgtcaacaacaaagttgtataacttatcaagatttacaacttttagtttggtcatttctctatataactttttttcaatagtttgaatttgaaaatatgacaacttcaaacaacatttccaaatactaaatgatttcaatctgaaaaagtcatcaataacaaagttgtataactcatcaagatctataacttttattttggtcatttttctatatatcatttgtttgaatagattgaatttgaatttgtaaatataacaacttcaaacaacttttcaaatactaaataatttcaactgaaaaagtcatcaacaacaaagttgtataactcatcaagatctataacttttattttggtcatttttctatataacattttttgaacagtttgaatttgaacctgtaaatatgacaacttgaaacaacattttcaaatactaaatgatttaaactaaaaaagtcatcaacaaaaaagtcgtataactcattaagatctacatcttttatttttgtcatttctttatccgacaaagtgttagtaacattgttcacaaaatttacacatttgtgttatagtttataaaaccagataagagatatgtcaattttgtgaacaatgttactatcactttatcggatgaagaaataaccaaaataaaagttttagatcttgatgagttattgaactttgttgttgatgactttttcagttgaaatcatttagtatttgaaaatcttgtttgaagttgtcatatttacaaattcaaattcaaactgttcaaaataatgttatatagaaaaatgaccaaaaataaaagctatggatcttgacgagttatacaactttgttgttgatgactttttcagctgaaattctatttgaagttctcaaactttgaattttaaatttaaaattgttcaaatagagtcagatggagaaatgaccaaaataaaaattttgagacacaatgagttctacaactttggttttggtgacttttccattggaaatcatttgttaacctcaacttttgttcgaagttgtcaaattttgaaaattcaaaatttgaattattcaaatgaacttatttgtacaagggaccgatacaatagttgtatatctcgatgagttatacagttttgttgtttgtgatttttgcatttgaaacacaaaaaaatcggcctaaaattaaatttaaagttctcataaattgaaaataaaaaaaaccacataaattgaatataaacatttcatatggaaaatagaaaaataatcatcagtgacgggcattatttaatgcccgatagagattaagtcatctcaatcgagcattagtatagggtctgtcactgatgagtatttaatacctggtagagattaagtcatctcaatcgggcattagtatagggcccgtcaccgatgactcatctgtgacgggctttagttaatgcccgatagagattaagtcatctcaatgggggcattagtatagcgcccatcacggatgactcatctatgacgggcactatactaatgctcgattgagatgacttaatgtccgtcacggatgagtcatctgtgatgggctctatacttatgcctgattgagatgtatgtttgactataatatgagtaaggtttctcagatccgattgaaaatttttctaagtccctccactgttagatatcaacaagttacaacttcttctccagaaccgatctccaaaaaactacaatgttaagcgtgcttggcctgaagcaatttcagaataggtgaccgatcgggaaattcttcctgggtgcacacgagtgaagacaaagtgtgtagaaaagactggtccagcctgggagaggcgggaagttatatttgtgatttctaggctatgatggacgtcgtgcccaattgagatggtggttaccgttctagtgctgcttgatgcaagtcaattcatctaaccaacgtattactccctccttcctaaattgatcatcatgtaatagaattcaaaatttctcaaattgatcattatataactgcatggacacggatttcatcggaatacaattaatgcagtatgggagaatatgtgcatacttaggtgtaattggcatgagattttaatcgatgcatgcattgtaggagaatgtatgcatggtgtcttgattgatgtgatttaaattgttctcgaacttggtgtataaacttatatgatgatcaatttagaaagaagggagtagcatctactacttccttcggttctaataacacttatcattttggacaaggatacggtatttaaataataactttgagcactatcatctattatattattattgttactattattattattattattttgtggaagtactttttaatgctaatctatatttgtgtctctatatttccaagagaaatattttataacttacttatagttaaagattttaaagtttgatatcatccttcctgtcagggttacggataaggtataccctctacccttggatgtacgctatatggcaatatggtacatctgcgcgtgtacggacgttctctgcatacactacgaaaatccatcacgaagtccaccaatggaaatgtccctacccgtataggactgggtcgtcactgtatcgtgaagggtccgatgtctccgagtcctacttggggactacctgacctgcgatataaaagggaccccccgagaaggcctaaggcatcgaatctcatagccaacacaatgaccacagcctacggagccggagtctacaggagcgaagtcgccaggtgatctagttgaatcaactcgactacgatctcgtcggtatcgtcgagttctattattccctttgtaatttgtggttatctccatataatcccatataaactggattagggctattacctattaaggggcctgaaccagtaaaatctttgtctcctgtttccttgatgtcgtactacgtagatccttgtagcagcgtaccccaataccctctatatccggtctacgggtgtcccctgtcgacagtggcgcgccaggtacgggaacttggtgctcaaggttctactactatgacatcaagctttgtcgacaacggcgtcaacaccggccccattcaaggagtccctacttcaacaatgctggtgtggactcaagtcagcgaaattgttttcccggtttacaccacggtaccaatctcggctggtccatcaatgaccggaaacgagaacgccgtagctataacctcaaacgaccctgtgtcgaaggatcctcccgccatagcggagaacagaacatcgacgtcatacgagtccgagaaggttcctagtgcggccaaaccttgtccttccgacaagaaccatgagctgacaaggacaacttccgaggtaacaaagtcctggtgtcccatccacaagtccaggaagcacaacttgcaagcttgctgggtttttctcaacgtacaagctgaaattcatgcttgcaaggagcgtggaatccagcgtacttctccaactcgtgatgtctattgtcctattcacaagacgaagaatcacgaagtctcaagctgcaaggtctttctccgtgccatgaaaacgacgcatcctaaggtctagtagtcaggaacctctcttaaggatacagacaaagaacaaggagcgacgttgacctcggatcgattcgttggagtaatcgacatcgacccccacgagccatcagtcctacacttgctcgaagactatggctcgtcatcttccagtacaccacgcgacgtgtttgccataggtgggactagcacgtctgcgcacgctaacgcagaggtggagaatcaggcggtcacgccggcccaacaccttggcaccgtcaacgcaatactgagagaagctccctatgaccccgtacttaacgatgatctcgcacgatggacagaacgactacaggaatcggtagccaatcttagtaacgcgttcgaggaggccactactagagcacaaccaaaacatccgatagctggcggtgccgatggcgaaccaccggagcaacggacgtcacctagatgagctactcctccaccttgcggcaccggcgatctccgcgaccatctgaatggccgccgagaagcacgacgtgcgcgagacaacgagaatcgttcccgacatcgtgtctcttcacgacgtcgtgagaacgaagagcgaggaggccgctcgaacgaagaccaacaccaccataatcgtcataaccgccgcgaccgcaacgatcgcgaacagcggacgccggacgatactggacgaggacgccgacatgacggtgatgataatggggatcggcgccaggacaacaatggtggacgacgatagaattcccgagaacctgaacatcgccctcggaatcggacaccggagccgggtgacccatcgtcatcgtagtcttcatcttcatcctcgtcatccgatagacatccacggaggacacacgatcgccgacaacccaccgcccccagcgccgggtgtagagctttcaacaattctctacgtgttgtccgatggcatgagagattgtgacccggagcaatagagaagtacaatgggagtactgaccctaaagaattcctccaggtctagtccacggtactatacgctgccggggcagacgacaacacgttagcaaactatttgccaacggagttgaaaggttctgcgcgttcgtggctgatgcacctcccaccctactcgatttcttcatggcagatttgtggcagcaattcgttgctaacttccaaggaacttacaagcgccacgcaatcgaagacgatttacacacattaacacagaatccgggcgaatctttgagggactatgttcggcgctttaatgaatgcagaaatacgatccccgatatcaccgacgcttctgtgattcgcgctttcaaaaccagtgtcagagatcgctatactacccaggagttggcaacaaggcgaatcacaacaactcgaaggtttttcgaggtcgtcgatcgatgcgctcatgcggacgacgcactgagacgcaagaacgacaagccaaaggcgggaggagagaagaagccagccaaagacgaacctgaaacaagcgagaagaaaagcggcaagagtgggaaaaggaaagctcaagcagaagtcctcgcgtctgaatacgagcgccctcccaaacacccagacctacaaggcaatgatacgaagagaatatggtgccccatacacaagttgggcagacattctctggaggattgcctcatctttaaaaagtcgctggaaaagcaactggctttggagaagggcaaacgagtacgtgtagtcgagaaggccgctgaggcaaccactcaggactcggactcggcgtacccagattttgatcttcatgtctcgcacatcttcggaggttccatagcgtactcttcaaagtgagaatacaaaaaagtggagcgcgaggtttgttcgacatggcaaggggttgcaccgaagatgaagtgttctaaacagaagatcgagttctcagatgaggaccaccccaaggtagctgttatcctaggacgatatccgatcgtggtcgaacccactattcggaatatcaaggtagtgcgagtcctcatcgatggcagcagttccatcaaccttctcttcgccagcaccttggacgcaaaggggattccacgaagcaagttgacaccaaccgatcaacctttccacggaatcactccccagtcttcgtccaaaccattgggcaagatcacgcttcctgtgactttcggccaaatgagcaacttccaaacagagcagataacatttgatgttgttgagtttgacacagcatacaatgccatcatcggaagaaccgcactcgcgaagttcatggccgcatctcactacgcgtatcaagtactcaagatgcccgggccgaagggaacaatcactattcaagggaacgcaaagctggcggtccactgcgacaagcggagcctcgacatggtcgagcatacgcccagcccacccgccacagccgagccacccaagaaagtgagcaaaacaactaagacgccgacaagacagcgcaatcaaaatcgttccactctctagtgccaacctcgacaagacagtcaagatcggggcatcactgaacgagaaatagaaacttgcgctcatcaccttcctccgtgacaatgcagacatatttgcttggcaaccgtccgacatgccgggggtccccaaggaggtgattgagcacaaacttatggtgcgacccgacgccaagccagtaaaacaaaaactgcggagatttgcaccagatcggaaacatgccatacgagaagagctcgataagcttctcaaagttagtttcatcaaagaggtactccatccagagtggctagccaacccagtcatggtgcggaaggccaacgggaagtggaggatgtgcgtcggcttcaccgacctcaacaaggcgtgccccaaggatcacttccctctccctcgaatagaccaactagtggactcaacagctggttgtgagctgttaagcttccttgacgcttactccggctatcaccaaatcagcatggcaaaagagtatgaggagaagacagcattcatcacgccgttcggtgtattctgctacattaaaatgccgtttggactgataaccgcatgaaataccttccagcgtacggtctaaggggcacttagcgatcagctgggtaacaatgttgaggcctacgtcgatgacattgttgtcaagaccaagacagacgactcattgattgacgatctacgggaaaccttcgacaaccttagacgatatcgtctcatgctcaatcctgagaagtgcacgttcggagtaccatcgggcaaattgctcgggttcctcgtctctggcagaggaatagaagcaaaccccgagaagatcaaggcaatcgagaacatgaagtcgcccacaagactcaaggaggtatagaagctaaccggatgcatggcggcactaagtaggttcgtcgctaggatggaagattgagcacaacctttcttcgctctgctaaaaaaaagacaaatttgtatggacacaggaagccgaagaggcgtttatcgcgctcaagcgctacctgtcaaatccccctgtacttgttgctccccaacctaatgaagacttattcctctatatcgccgccacgccttactctgtgagtactgtcattgttgtcaaaagagaaaacgtgcaaagaccagtctattacgtcagcgaagctctccacgacgcgaagacaagatacccacagatccaaaaactgctctacgtagtaatcatgacgtcaagaaagctacgccactacttcgaagcccatagggtcacagttgtctcctccttccctcttggtgaggtcatgagaaacaaagacgttgtcggccgcattgcgaaatgggtagtcgagctaagccaatttgatgtccacttcgtaccacgaacagccatcaagtcccatgttctcgctgacttcgtagccgattggactacgcctgaaaacaggttagacagtcagaccgacaacgaaacatggacaatggcgttcgatggcgcactcaacagccagggagcaggtgcggggttcatcttgacatcaccttcaggagatcagttcaagtatgcaattcaccttaacttcagggcaaccaacaacacagccgtgtgcgaaggactactcgctgggataagagctgcagctgcacttggagtcaaacgactgatcgtaaaaggggattctgaactagtcgcaaaccaggtgcacaaagattacaagtgctctagccctgagctgtccaagtatctcgcagaagtcaggaagctgaaaaacagatttgatgggatcgaggtccgacacgtatatcgcaaggacaacatcgagccggacaatctagcacggcgtgcatccagacgagagccactagaacccggcacctttctggacatcctgacaaagccatcagtaaaagaggcaaacggcgaagatagcctagtcgcccccgacatcagctcaggggctacagaggcagagcgtgccgttgccgacatcgagaccacggacgactggcggaccccactcattaaattcataagcagcgacgagttgcccaaggacgatgcagaagtcgagaaaataacccgtcaagcaaaaatctcctgtataatcggcaacgatccatacaagaaggcgccaaacagggtacttctcaaatgcgtctcgtctgacgacggaaaacacctcctcctcgacatacacgaagggatctgtgggtcacatgttgccggttgtatattggtcggaaaagccatttgacaaggatttttctggccaaccgccctcaaagacgcttgcgacatagtacaacagtgtgaagcttgtcaatttcatagcaaacacacaaagctaccagcgcaagcactgcaaaccatccctctgacttggccgttcttgtgctgggggctcgacatactcggtccattcccacgaggacagggcggctacaaattcctgttcgtggcgatcggcaaattcaccaaatggatcgaggcaacacccacgggagaaatcaaggccgacaatgccatcaaattcattaaagggatattttgcagatatggactgcctcaccgcatcataacggataacggctcccagttcatcagtgtcgatttccaggattactgcatcggactgggagtcaagttctgctctgcctcggtttctcacccttagagcaacggacaggtcgagagggcaaatggcatagtacaacaagggatcaagacccgtgtctacgacaggctgatatcacatgacaagaagtgggtcgaagaactcccctcagtactctgggccgtgcgcaccacaccgacaacgtccaacaaagagacacccttctttctcatgtacgactcagaagccatgctccctaccgagttacgacatcagagtacacgagtgcataagtactccgacgaggattaggaggaacagctaaacgacgacgtgaacctactcgaggagcatcgagaacgggttgccgtcagggcagctagctaccaacaggccctccgccggtatcacgagaagcgcatccgagcacgcatactttcgatcggcgactacgtccttcggcgagtccaaagccaagcagggcgaaaaaactctcactcaaatgggaaggaccgtacacgatcacacaagtcttgcggccaggcgcattcaagattgcagacggcgatggtcgcgagttagcaaattcttggaacattgaccaattgcgtaaattctatgtataagtcaatagtatccatacttgtaagacatcttacaacttcagtaaagcctgtttcaaggtacagatttcaatcaaagtgtcccttcccaacgatcccttacccagatgacacctagcgttgaaacctatcctcatgtccctttacgccgtcttgacaaggccttcgaggaacctaagggaactttggctggggacgcccagagctgataaggccttgtcggatcctttagagacgaaagaccatgtaagatctggtagtgtaagagttctcgtcatgcgtattaaccaagccgtgtaatcggaaatggattttccaacttcacggctgggggctaggatcagtgcttattcaactaaggcaagtcaaatgtctaagagcctaatcttccgagaagaattctccgatgacaaggttgggggctagggagagtgtataactcaagtgactgatcgaagtcgcgaagtgagaagacactcgtacgcaccacatccagagtaagaaagcttagttagatagactccctttctacttcacaagtatttcttacagaccgcaaaaaattccaaaatatattacacttttcctaagatgcttgtcacagatatacaaagactaccaggaaggccaacgccaatccatcgactagaagattttctccgctagcggcgccatcgacttcgctaggttgtctatctccgcaggagtcctccgagaacgagaaaacccttcgtggaggaactcgaggtgtaactgcggacgatgatctcgtatacatgccagcacgtgccctccggcataccggctcgatcgacgacactcctgcttcaaggcctcgttgatacgcttgccgatgccttcgagctgagcacaggccccgttcagccatgagatatacccggccgctgactccttgggatccccacgaggtattcggagttccctgcagacaacgaccatagctgtgcaaaaactcctgaggtacgagttgaaccacacctcgcgacctcggagtgtctccatgccccggtccctcttcacttccaacatagtcctctcaagttcggcgaccccgaacttcgtcctccagtattggacgcgacggtcgtggtcagcaagcgcactctcgaggtctgctcggcaagcaaataactaagttaagctgttctcctcttccgagagcacggcaagttaagctaatccagatagaagagcaaaggagatggagacaaaaaaaacaacctaaaggagtcatcgccatatcctggtccacatcgtcctgtggcgcatacggctcgagtgcgagtaccggagcgattacaggcaactcaggctgcccgcgctgctggatatcctcgacatcgacgtctctataatcaacacaaagtactcaaaatcaagacgctaaggaaaactaaggcaataactgcacacacaaaggcagttggaaccaacgaaagttttacaaagcgcgattggttaaggggtacagacaagtagtagccctactcttcaaaaagtgggagaacggactcccccagatcgccaacctcctccatcacatcgttacgcgcgtcgctagccgccccctgatccaagatcttctggagatcgagttcagggtgcgccaaccttacgcacgcgaggacatggcacgccccggtgtagatcccattggacgtttcctccccgatccctgccgcgtgcttggaggggatcacctccatcgccgccgccagttctgcgagcgaagacgtcaatgagaactcatcagggttcgccgggatggtgatcttgacactacattccctggcgagctggtgtaggccggtgtaggtgacccgcaacaaacctcggatctccgacgggttgttctcgagttccgacatgcagttctcgagcccctgccattgccgttcgttgccggctaccagttccctcattttctggaggtcctcgcgaacctccgccaggtcacgcgccagtttgtcggcacgctcgttcgccgacgccgccgccgccgcccttgcctccgcgatctcgcaacttatgccgcgagcaccagcctcgaggatgcgccccatctcgacttggagctccccccatgtgaggacggcagcaggcgggcctcgaccgggtgcaagatcgctggcagggccgctaggcgtcacctcgcggctcctgggcacgacaacgacatcagtcgaggccactgcaggagacacgctggagtttccccagacccatcttgcgccgccttcgcccgcgccgccctacgaaagacggccatgttggtcatcataacaaaacgccaaaatccgatcaagtcaagggcctcaaatttcgtccacttacttctcgccgagtgtcaccagcctctgccgtcgtggaggcgggggagacgcatccgaggcctaagtaaaccgagtacgatatgagggcgacattttccgactatgtaattgataaccaaaaaggcttatcgatggggtgggcgtcggaactttgccgccgctggtcgtggcagcagtagcggcaatggccgcgtcggacgcctcctgggcaatgccctccttcaacgaagccgccgtctggtggtccgcgagcggcccgatgatgtcagtcatggggagagcctgcacaacatgaagtcacgatgcgatctaaagagttaaagggtaaagggtcatcgattacactcacgttgattgcggcttcgcgctcagccgcctctttctcgcaaagagggatgggggcgttgctcaccgtcgtgggaccactgatcatcacctgggcaacacggcgctccacggttgcgctgttcaaacctgtagttcgagaaccaaatttcgataagtcaggaggaatgcgcatgaaaggagagaaacccagaatacaagaaaaataccctgaggagaaacccgggtcgtgtcctccggcccagagtagtcaaaggctggatgggctcgagcctggagcagctggatccgtctaccaatgaagtcggcagcgacttcatactccaacaaccctcgtactcggaggtcatcgatgatgtcaatgaaagactggagggatagggtcaaggcgggtttggcggtccaagacggaatcttgtctggttgctcctcagaaccacctcgcccgccatttgctacgagaagaggggcactagaaagggatatatcgtgacttcaggccatcttgaagtcaaaaaccaacacacccggatacctttttaggttccatccagcgcaactcgtagtaaaaacggaggaggtcaagaaacggctctaccccaatgtaggcctcacatagatgataaaaaatgctaaggaaggctatggagatggggttcagatggagcagagaaagaccgtagaagttcaagacgagaaggaaaaactcagaaggcggaggaagaaagccacagagaatataatcctcaaccgcaaccatgcggcccaggacgggtttaggttcagtacctcccggttccctctccatggtcccgcgaccggggagagcgccctcctcctgcaacttcttcaaagacgcgctggtggaagtggacttgtcaaggttcatcgccgttggagatcaccggagaagaaaccgaggcgagcgaattagggtttgcgtggaagcggagaagacgaagagcgttcggaggctagaatgttcttgcaacagccggactccaaaatggattcccaaaactcctttgaataggcgcactaccgacggtgcgaattccaaggaaaggagagagatggccgccggaaatttctgggtccgttgcgcgaggcggttttttggacttcaatttaaattcactcataacagttgaacttcgcatggtgttgtcgaccactccttgtctctacagtcctcacaccgagatcgaccagtcgagaacgacagcaactccgacatcagaagtcgcgaccgattacataagttcatttaagctcaagtcgggggctactgtcagggttacggataaggtataccctctacccttggatgtacgctatacggcaatatggtacatctgcgcgtgtacagacgttcactgtatacgctaaggaaatccatcacgaagtccaccaatggaaaggtccctacccgtataggactgggtcgtcactgtatcatgcagagtccgatgtctccgagtcctacttggagaccacctgacctgcgatataaaagggaccccccgggaaggcctaaggcatcgaatctcatagccaacacaatgaccacagtctacgaagccggtgcctacaggagcaaagtcgtcgggtgatctagtcgaatcaactcgactacgatcttgtcggtatcgtcgagttctattattccatttgtaatttgtggttatctccatataatcccatatcaactggattagggctattaaggggcctgaaccagtataatctttgtctcttgtttccttgatgtcgtactacgtagatcctcgtaccagcgtaccccaatactctctatatccggtctacgggtgtcccccgtcgacacttcgctaaaacgacaaccattatcaacccggagaaaataccacctacatatatagcacatagtcataatggacgcattacacgcattacaccaggatatcctaagtggactccagtttgaaatctcaaatcttcctacttaattttcagggaaaaaaaaacataactgcattacaaaccgatagcttctcatgaaagcaaagttgctctacatatatgcttactacaacctgatatcttggtgtggtgttggatgtgcaaattaagggcatacgaggcatcgggaattccatatacagataaccaagaattgttcgttccaatatggtttcaggtaccgccttctgtctcgatctgtttcctccgcttgtggttcgattttcgaactgtgaagccgaagctcaaggcgtcgccatgacttgcatgatcgaggaggaaatctgggtgtttggagtggggtatgggtgacctgtgtgtcacttgcatggatctgatcttgccctttgtaattagtgcgatcgattgaaaaggagcagtgcaagaacagtattagtttgatagtatacctttagacttatatctgaaatgaaaatatgtttggtcatatcaaaacaaactactactatgcatgatttttgaaaccgaaaacccttttgatgataaaaagggcatctgagtggcttcctgtttcaggatcttcagacttaattactgtgaaattaagcttcccatgagcactataatcaattaaatctccatcataatcattttatatatagcaaaaaccaaatcatatgtctctcgaaagaaaaaggcatgtatgacctcccagattagatggtatgataattaagacgagatccgatgccacatacttcctccgtcccaaaacataagggactttgaatggatatgatgtatcatattaatatgaatctggataaagaacttgtccagatatatcacattcttttagatctcttatattttgggacggatagaatatatttttagctggtccacaaggaggactacagatatttactgcgcatcaacttggctgtagcaaagcatataggacgcgctataccgatcgtcgaattagcaagaatttccagcacgggagtagcatgcataacgccagcaagcaaaagggtctacacatgtttctcatttagttagggcctaggaggcacagggaatctagtgtagaccaaggaaatggaacgaccttcgtctacgacctcaaagctcgaacgtccccatgacctcatgcatctgtaggactctagcacgtacgtacacgagaactagtcattaaaaattggaagtttttttatctcttactacagaagaaactattaccttgaaatggtgtagaaatccatgaccataacgtcgggttgattaattatttgaagcaataataaaactgttgattttttttttgacaaattcagtacgagcaatgtatatcactatggaacttctggagtactaatcaccacgatgtaaattcagtatgtcaactagtaaccgcataataaggggaaggacgacgacgataaatgaattttggtagatgaacaattacgtattttcatgtcagaccacccataatttgcattatttcaacaagtcctgacaatacaaaattacttaaacaaattatagctcgtattatttgctttagcaaggaagctactgtgcttctaagaataagtaagcacattgagagcgtgtgatacccagggttcacgttatcgcgcggtaattgcggttatcgcgcttaccgcgtgcggaggggatcggttaccggtggttagggtttgagaaattttgagcaaattcaaattttcagaaaaaataaaaaaaatcatggatgtagttcttgatttctaatggtagatagtgaagaaattttttgatcaaaagtaagataaaatcaaatttgaaggaaaaactgataattgtttaggagaaatagaaaaaagaaaaaatgtattgggcttcatttttgtattttacatccacaagctaggtttgcaagtgtcctatatattcttccccagtctctatctctactacttaaaaaataagagatgcttccttcgtccgttaaaaaaaatagcgaaaaaattaaaataaaaaagtccgactcctatatccgattccctctcagaaaccaaaaaaagtccgactctaaattggtgaaaaaaattgatgtgccggattgaaaatctgtcttcaaaaaggaacttacaggtcgagagcatttcattttttatgattttaattttttggtttgtacttttgcatttgagtccctataatttttatatttacatttgagtccctataatcttgtaataaggtacttgaggtcgtttttgttaaaaaaaataataaaagagagagaacaaaggcagaaagatgcataaaaaaaagaaaggccgcaaaaaaagaaaataaagaaaaacaacaacaacaacaaaagtctttttcccctaagtggcggaaaatctgtagatttgaacggaaaaaaatctgattcatataaaaggcaaaaaaaaagtggtgaaaaaaaaactagatccgattcctttaaaaacggaaaaaaagtctgattcctataaaggcgaaaaaaacctgaaaaaacatctaaaaaagtttgtccgattccctaagaaagtagccaaacaaaatccaatttctaaccagtatatatctcttctctatctctaatccaatctaacaatttaaaaagagaaaatgcacgagaaaataaaaaacggttcaaaaaaacgcgtgaggcaaaagtcagaaaaaagcgcaaaaaaacacgctaaaaaggttttccatcttcaataaaaaaataaaaaaacgcgcgagaaaaattatttccatcgtcggtaaaatattttaaaaaacatgcgaggaaaaaactatcagaaaaaacacgccatttctaaaaaaatggttttataaaaccacgcaagaaaaaaacaccatccaataaaaaaacaaatcgctctgataaaattgtcagaaaaaaagctaaattgatggacgcttgagtcggataggatccatcgattttttttccatctactacatggctttatttcgtcatatattctcctgtattagaaaaaaaacaaaaaaaacattcgaaaaaaacaagcaaaaacaacgtgcgagaaaacatgcaaaaaatacacactagaaaagaaaagaaaaaaaaggagaaaaatatggttttcttcgtcagtaaaaaaagcaaaaaaaacattctatgaaaataacttttagaaagaaatacgacatttctgaaaaatggtttgagaaaatagcgcgaggaaaaaagcactgtttataaaaaaaacagccgttcattaaaatagaaacattgtcattgacatgattatgcatgaaaaacgtatattatcattagaatttctttacccgttacaatgcatgggcatttttgctggtttctatacacattcaagtgatttttctttttttttagcttcttttcatttttttcatgttttccacaaatttcgcggttaccgcatcaaaccacgcggtaaccgggacaaaccacgtggtaaccgcgacaccgccaattttttgaattcaaattttttaagatgaaattcacacagttttcggcggttaccggcaaccgccttattgcagggtggtgataacctcctctaaaatggtaaggtaaaccctcgtgatacctcattattgtgcagtgtacatggccgcttcaccttgggttatgggtgcgtttgaatggatttccacatggatatatcatgctagcacagatccttacatctgtaacgggtcactgtgacgggctcaaacgagctgttacagatcatgtatcggtaatggacgatattttctagccattagggattaacactcatttgtaacagctcaccaatagaagccattgcagatgttagtcaccagatttgtaacggctcttattaataaggagtcattacagatgtgccttcatctgtaacggctccccaatataagttgttatagatgtcaacctcatatctataatgacttcattttagcggccgttatagatgtacataacggctccacaatagatgtatctctctagccattacaaatgagtctccacatctataactgttgggtagttgtaaccgctcgtctaaccattatagatttgagttttgcgagagttctgtgctagtgccacatgctggtcttaatatgggattctagctgtcgataaggtggtgacttctttacaagctagagtagtactggttcggcattggaaaaatccgattactttttgggaaatttctgaaattgcagaattttattcccctcctaaaatgttttgtcttacaaactaaagcatgtgaattgccgattagtaaaatatgcacatattgatcggtgcattactcatgcaattctaatccaatatcttctgcaccctccgtcccaaaataagtttacttacacgaattaattcatgcataaaagtgaatttattttgggatgaagagtatacatgatactcatctgacaagctgtgttagttcacaattcatcaaccgtcaagtagtaccttgcctttgcaggagaagtattcatggatccagctaccctaaatggcagtgactcaaatggcagcatcgcgtgaaaggctcttttgaattagggggtgtttagatcaggggtgtgaagttttggcatgttagatcggatattatatatggtgttgcatgggagccggctaatgggcgagtgaccgccccaggcaatcacccccccccccccccgatcccctctatacactactctattccttcctcctctccttctcttcctactacaccataaatttaaaaaaaaataaaaaacacaaagttgaaaaatttatgtatataaatactatatatatataattgaattcaaattcaaaattgaaacaggtatgtaaacttttgacttataaactttgtgtctataaactttagatatatagaaatactatatataaaaaaaattgaattcaaaaaaaatttgaatcggatatataaacttttgatttataaactttgggtctctaaactttagatgtgtaaacttgaggtgtataaactttaaatgcataaatttactaaaataggaaagtaatatggtgctaaaaaagaaaaccaggtagagggaggggatccgaatctgatcgccagggcaatctcgtgtcgtatagggtattcgaacactaataaaaaaactaattatagaatccgttagtaaccgcgggacgaatttattaaacctaattaattcatcattagcaaatatttactgtagcaccacattatcaaatcatggagcaattaggcttaaaagatttatctcgtaaatttctcgcaatctacgcaattagttcttggacatatatatgctcccagtgacattaatagggtctgtgttggtgtcggtacattaatctgggagcagtatatatgtgtactggttgggacttgggtgaccggagatccatcgtaattacactgcatatactgaaaagccacagtgaaatatgaacatgctgcgaaaaagctctgcttcatacgtgttgggtttaggaggcacgaggaatttgatatacccagggaatttgatggatcgtacgtccaagtggacggcggcaaattaaaacgcagaatccggcgggcggcttgcagcagaatgcagaaagagaatgacagctcgtcgtcgctgcccggccggagtgcatcaccgggtgtaataatcaatgtacttctcttgatctttgtcatgggagtaattgattgtactggacaccaatgtttccataattcttgtgtgacttctctataggagaagctattcatctgaaaaaaaaaagggaatcaatttgccttgtgcattcttgccgcaggaatcagagcagatctcccagacacatacatgtacagtgaagattcgcatgcatggtagtataagggcatgtttagatcctagcccaaaattttagggtgaataatcaacatgatcctaacttttgcttaaggatcaatttagtacttgacattttgtattatccaaacaagtccttaaagttcattgtgtgatttaatatagtcattgaaccctctaaaaataccatgtatacatgctacatcatctattcatgcaaattcaatatttaaatgtccattctacccttacgttttcataggaaataaagaaaaactattgagaaaaaaaatgttttggccattggcaaaaagagtagcattggtaacaaaaaaatttttggcattttcctttgttttatgattgcttcttcttgtttttatctttgcttttttataaaaaaaatataaggttaaaatggacacttaaatgttaactttgaatgatgtggtatgtccacgtggcattttaagtgggtccaaggactatattaagccacatgataatctttagagatttgtttggacattataaaacatcaaggattaattcgactttagagcaaaagttgaagggctgaactggctattcacctaaaattttacaccctatcacattaagtgtttgaacacctgcatgaagtattaaatataggctaaaaaataactaattgcacagattgcgactactttacaagacgaatcttttaagcctaattgctctacgatttgacaatgtggtgctacagtaaaaatgtgctaatgatggattaattaggcttaataaattcgtctcgcggtttactgacggatattgtaattattttttattagtgcccgaacaccccatgtgacgccctatataatattcgatgtgacacactaaaactttacacccctatatctaaacacccccctaagattagaactgtaaaaaaatcagttgtaaaaaaatcagttggattaagaactataatgatatataactgaacaatgatttaggattgagcagatacatattgtaggtgaatatacaatattccactatataataacttgcttactatatgccgtcgatacacatgatttatgtaggaagatatcaatatcctccctccgtctcaaaatataagggattttaaaatatgtgacacaactataaatctggacatgctccttgccaagttcgtcgtactaggatatgttccatccatccaaaatctcttatattttagaacagatggagtatattaatcgtacatgatagataatgatgtacaaattaagtccaagctgcttttgtgatcgcaacttcgcaagccgctccatctagccatcatattagtatgtaccacctacattcagagctccatatatatagcacgcagtcataatggatcggaagcactataccaggatatatattctaagtggagtccagttgaaaatctcaaatcttcctgcttaattttgaggggaaaaaaaacataactgcattacaaaccaagagctgcatgcaagcaaagttgttcttcatgctcacaacaatttggtatctcgcctcgccatctcggtgttgcgtgtccgaattaagagcttatgaggcatctggaattccagtgcagatgatcagggatagtttgttcaatcgttccactatggtttccagctaccatcctcgttatcggtctgcttccaaggcttgtgcttgtaactgtgaagcagtggctgtggctggaggacaaactggcctagaaacatgaggcgtagtatcacactctgacactcacctacgggtgattttcgtgtcacttgacatggaactgatcttgccctgtgcagtgagtgccagtgcgatttgaaaaggagcagtgcatgaacagctctagtttggtagtactctttagacttttaatcagctgaaatggaaataagctcttcatagcaaagcaaactatgaatgatccaaatcaatagggggtacctgctgacaagcactgcaatcagaatggcttggtcagatttttttttttatctcgagatcgttttatggtttcgtttgatccattaatccaagacccttttgatgatttttaaaaccgaagacccttttttatgatacagtgatactatttgagtggcttcctgtttcagaaccttcagacttaatcactgaaaaaaagcttcccatgagcactataatcaataaaaagatccttcttgatcattttataacaagaaccaaatcatgtctctcggaagaaaaatacatgtacgatttccaagattagctggcatgataattaagatgagatctgacgcttacatatatttttagctggaccacaagtactacataaattaactctctctgcacattaatttggctgtagcaaactaccgattgaggtctatccatcggaatttgcactacaaactgaaactgtaatttaatactccctccatccatcaaagttacacctatttcacatttgagtttttccaaataagttgttcctatttatagtctttatacattcaagacttaaataaagagataaattaaatgttttattagaacccaggaaatcatctaaatactaattggttgcatgcttgcagagaccgggggagatgttctagttgtttctttcttttttaaacttttgttctagttgtttctgttaaacttttgtgcttgggagatgttctagttgtttctttcttctttttttggctgtgtgcattttatgcagaggccgggagtgactcagtttgattgtatcatcttgatgtaattactgagtctaaataaagcttccattataaaaaaaaatttcactctttgattttgtaaggaccaaactgatttaatttctttttgatcttggtgttaaaaagtaatatgtctaacttggatgtagggagtccatcaacctgcagctcggatgtagagcatgcacaataccaacaagcacaaggctctactcaatctgttggatcatactgtctgttggcttgggaggaatttggaattcagcttagacagagagaatggaacggccttcgcgtctaccgggaaacagtgtgcctttgtttgaacccgaattctattccctggcatcacgggtaacaagtagatatgatcatgcatcgccgagatgtgctggtttgtgctggttaaactcgtagatgcaggcagataagctccgtggcaggtttaatcttttgtggcgtggattaaattagccaccccgtatccatcaatcagaaaaagtttgatattttgatactaaagttagtcaacttttttaagaacaactaagaagaaagcccgagcagatgcgcgggcagttttatgaagacaatttttaaaaaaggttatatctcaccatttataagccgagaaatatattgcatactttaatatatttaagtaataaggttttctcctagattaaataaaatcactttgccacatataaattaaattttcttgttgtcacttcaacctattatcactgtttaaaagccaagtaactattcatagatgaactacgtaatgtatcaataaaataagcctaatacatcattaatacattgaaatatccactacacgtaaatgtttcgtacctcaccaattttcaaaactatatataaatattgtaaaaataccacttgtacaaattaatagaataacataatgttatacataaatgcttctctaatgcgtgaagccgattgtagtggctagacttttttttgtcatttgctttgaaacatgggtcccatatcgatgtagttgtgcacctccagactaacctggagcacaattttaatgcctaatttactatcacacccttatcgagttgtgcatcggtaagtagtatgttgagcactattggtgactgtggtctccattgcgaccgccttaactcaaccatatgtacgtccctgttatacttatagctgtcgacgggggatacccgtagaccggatatagagggtattggggtacgctggtacgaggatctacataatacgacatcaagcaggcagaaaacaaagattatactggtttaggccccttgataggtaatagccctaatccagttgatatgggattatatgatggaaaccacatattacaaagggaatagcggaactcgacgataccgacgagatcgtagtcgaattgattcgactagatcaccgggcgacttggctcctgtaagctccgacttcgtaggctgtggtggatgtgttggcggtaagattcgatgccttaggtcctcccggggggtcccttttatattgcaagtcggctggtctccaagtaggactcggagacatcggacccggcatgatacaatgacaacccagttttgtccgagtaggactccttccatctgtgaactccatgatgaattcccttaacgtatgccaaaaacgtccgtacacgcgcaagtataccatatcgatatgtgacgtatgtcgaagggtagaaggtatacctaacccgtaaccctgacaatagcaacgtagcaaactatattattcatgacaatagcaacgtagcaaactatattattcatgcttatgcccttcatgaaaggaaaaagagaagatggaggtgatcaaaagaatgttttttttatgttttgagagtagattcatggtatagagtagacaccacgtgtttatggtgttaaacattacgcaatttgaaaatgagtgaagttgtaattcgacggtactaaaagagaagatggaggtgatcaaaagaatgttttttaagttttgagtagattcctagtatacagtagacaccacgtgtgtttatggtgttaaacatttatattttgaccaacatctatagtatagcgcttggtttattttcaatacttatagttgataatcacatgagacacctttactgattcgaagaatatatttgttttttttcaaatttattaataataactaatatgtgggagtatatgggagttttttaaatttttttgtatgatactatatacgtatattttttttggttttatctttttttgacacgatggctttattcttttgccgtacgtatgtaggttttattgttccttttcaatcttacgtacttacattttttttttggcgaacctattctctctcgtatgtataggtggaaagtattagtattagagatatatatctaatctaatgatctaaataacgggtcgatcaatttaagtgaaaatcaacgggatagatatagatatagatatagatataatctaatggtctaaaataacgagtccaccaatttaaatgaaaatcgatggtgagattaaatagtgccacgtggcgttttaagagcgtttataagaatgccacgtgttgtcttgagagtgtttgtaggacgtttaatggacttttagtatataatagatagatagatatctcctcttagtccattcgcatatctgagttgctgcttgtccccctgcgtcgcccacgcgcaggcgaccgggggacgaaaccctcgccccacctttcccctccctcccccctcgccgccgccggagatcgccaccggcaaagccggttggtgaacgaggatggcggcggcgccctgtctctacgcgggggacgcggcgtccgcaagtggcagtgggatctccaggctgggcggcgacagatctgggcccgtcgtcgccagatccgaagacggcggcgtcgggcggcgcttcgaggcgggggtgcggccgtcaaagtctccacggcgcgtggcgacatgatggctgacaacggcggcggctggcggtggtaggcgttcgcgtggcggcgtggtggccggcagtcgcgagcctctgcagcgctgggtcggtgctgtgccctggcgcatggcggctcggcgggtgcggcggtttccggctccggaggcctccccacccccatcccctcagaccacctacctctctctctctctcccccctccccccagcggcggggttgcggcggcggtaggcactcccgtggcggcgggcatgtgcagcagtgcggctgccggcgcgcgggcggcagaattcgccggtgctcgcatggtggcgttgcggcgcctgccggcttcggtggttggtggtgcgtcagccttccagggcgccggcgactctggtcttcggcctcttctatctccggcggttgctgagccccccccccttcctcctttgctctctgcgccgtcccccggcgaaagaaaggggcgtgtgcttgtgccggcgcccccgctcccccattccttcccctcaccaaggtttcttcttagttgctcttctgctcacccccagcacgcccctctctgcgctggtggtttagttgaaggtggttgttcaattgtttggtttgtctcacgaagcctggagaacctcgccggattaatggaagacaccgacgtctttgttgccctgtctcagctctcagttcctctccaggcggcccaagcctccttcatctttggtgctcctcccttcttttggttgtctgtttccagacccgactgaggtgttgtgtttgtctgtgttggtggttcggtctatctgtagtcagcgctcttgggcctcgtcgtgtttcaagtgccctgtgtctgtgtaaacctgtcgtagtgccgagtgttgagctgggtgcttgtcctcttcattgctagagtctttgtgtttaggtggagtcggagctgctgtatcgggttcatccgatgagccgagcaacgataactttaaacattctggctctggcttcttagaggctctacaccttttgagggagtcttaggcgaaagcctagtctggtctcataggatcagcgacatcgacgcctgcgggcaccgttttcctccttggaggtgttgccttgtggactccctcccctttcgggtgaaaacccagcccagttgggtgggcgtcggcagcggcttctgtcgttgtttacctccttggaggcttcgccttgaaggtcttgctcttccctcggtgtctactgtggtttgtagttttgtcacgggctttttgtgtcttctgtgtaaggttttgccggtttccctttagcaaactgtgaagttgtatggtttttgggcccgattttccttataaatagggtcaactctcttcttctaaaatatcgggtagatctcctaccgtctactgttaaaaaaaaaaagcagttggaacgtcttcatgacctcacacatctctatcacgtgcatgagaactagctagtcgttcaaaatataaaagttattttatctctttttttaagataatagataagagagtaaattaacttcatataaaaccacacatattgtggcgcataaccacaagtattacggtcctaaagtttcaaaaaaccacattgtttgtcatttagatattgatctaccacgattttaagttctacaatcgtatctcaaatttataaggattgtatccgttgtataaatgtttcatctgttttttcaagttttgatattggagtacgttaaaacagttaatggtgtggttatgttcaactttacgaccataatgctctgatatcatgtggattttggcttaaaacgatcgcaccgtgccatgcgccgcttgcgtgtttatatatgtggtaggaaaagccccataccgtggcaatacaggagatcctagagattaggcataaccaatctctggataagattacattgttataacaactactcaactaatattgaggataacaaactctatctctacgcacatagcattatcacaatgagagtaagccacgacaacagcaaggctcagtctacattcatgtattatcttgataatgttctcaagcaattttcaaattggacacagtgaagaccttttaaacatctagaactgccactgtcagctcagacatatcatgaatctctgtaacttcaaacataagtcaatcaactacaattgcaagagggtaatggagatatttggaccttcatttggagcagccagcagtactcatcttagaagttttacaagatgatttttgttggtcttcctccacctagaccatatatatggctttgtaaaaccaagtgtgtcataaagatcaaggtcttcatatggctacttttttgtgataggttaaacacaagaaacatgttaaatagaaaaaaaactactcacctaacaatgttgatctcacttgtgcttcatgctccagtgatgctagagaaatcctattgcgcatctcttatttatatgtcctttcagcagaagatgttgggaaagaatttagatccgatgaaatatgaatctaaagtttttccaaatcctagtttcagacacaaggatttcttagaaatcatgtccataatgtgttggcatatctggaagtacatgaaaaggatttttttttttccaaaatgttttgccccactaaagatgtttgactcagatgttttaaaataaaattctcgtgcatatgtgcatgatgaatgaggtacttagttcatatgcttttttcctggttacggtatttataattttcaatttgctgcttccaacatgtcaatacttttgttttctttttcaatataacttaactactaggcaagacctgatagtaatttcaataaaaatatttattcaatttatatttttatatttaatttatttgggtaatcaaatcaataatccgcttatcgaacctggtggatcacccatctcaggtaattaggacagtttcaaatatacgtagtagtatgaactattgagttaaaaaaatagtaaattgagctgcaaaaatattaccattgaaacacataaacatgaggagtatgtgcatagtgttataaaataacagggtgatctcatctatataaaaggatggatcgcaaccgaaggcaaccgcgccttccctaggcgctcgcgtctccggttaccaccctttccccatctatatattgtaccgcattgatcaataaaggatcccgctcatcccgctcattcattccctacattcttgtgtgcaattctctctcgctcaatccctctcgctcaatcaatcttatacactttcatcacgttatcagcactttcgctctcgcgaaggagatcgcgaagtgaaacaaggaagaaacatcgcttttgatctaatagaaaagcgaatagaagaatcagagaaggtacgatgcctacctttcattggattatggatgccgttctcggcttccctcgcaatcagcatgcccgtcgccttcaccaccttctccgtcgatcggagaggagtggctgccaccaccactgtcgccaccaacaccatgaacgtcgggctagggctggtggccgtcgccaccaccctcgccgacgcattgtggtggccactactccggttgctcctcctccgcctccgtctccggttgccgccgtgcctcgccgtatctgtgtgtagcgggtgcagtactacgcctaccacggatggacggcagtggtgacactgcccggcgagccatgcaatatttccccggagatggagtcgctgccgccaccaacaaccgctccttcaccacctccaccgacaccaagccgacgccgacgccgttcccccactcccacgccaccggggtccggcaggaccggtaccctggctgcgtgcacgggggagccgcccttcttcaatccgtcaacgtctcgtcgtcatgccggtgaagccgccgctcaccgtcccggcctccgccacaccttcatcgccattccccatggctctcctagccatacactccctaacggggtgccggggaatggcgtccggtgtcacgtcccaaaacgaccctaaaatatatcctttaaattatgcctagaataattaaaatccgtgtgaaagcctccaaaaattaaaatgtgcaaagtaaaagtcaaacaatgcttagaggatttttttgtatatttcctaaaagcctaaaatgtgtaaataaattttagtagaattttcagagcacaaataataattaagaagaaataaacaaagttaaaatgattttataaaaagaaaaaccttaaaattcccccctccccctcttgggccggcttggcccatctccctctccctctctctcctctccccgcggcccactcagcccaaccccgcgcgcgcgccgctgacgggcgggcccgcccgccaccctcgctgacgggtggggcctacccgtcatctctgacctcccgccgctcccgccgctccgcccacgccaagcgccgccgccgccgccgaatccgccgcatcccgtcgtccccgcgtgcaatcaataggggggaattattccccgtgattccctctccctttccccccaattttccctccctctctcccttggattcatttggaaaccctcccctaatcccgccggcgccattgatggagcccgagaacgccgcgccggtttccttcccctccggccgccctctcccccttccaaccctatttaaaccctccccgcacctcctccgtccgtttccgcctctcgccgcccttcctcctcgccggattcgagctcgcgacgtcgctctctctctccgccgtcaccgccgagctccggtccgccgccgtcgtcgccccggaccgcctcccacctcggcgccgcttccttcggcttcgccgcatcctcgccgacctcgtccacctctccgtttcggtagccgaccgccggagcaccgccgtccccgtcgacccgagccacgccaccgcctccctccgctccggccacctcccccgtcgccgccgtcgccccggggtgagccgtggacggtcgcctcctttcccccttccctcccctctctcggccgccgctccgctgcgccggtggtcgccggcggcgaccatcggagcgtgggcgcgccgcctcccgccgaccgcgccggcatggccgccctcgggcgcgccgagtggctgccgcgtggggcccggccgtcagccgcccgcgccctcgggtgcggctgacgtgtggggcccacggcgccagccggtgtgagcccgggtgcacccggtccaccgtggaccgtgaggctgccgcgtgggccccactcccgtggacccggtccgcgcgcccctccccctcggctgacacaataaaacctttttaaattaaattttaaatgaagaaattcgcaaatattcatttaaagagcatataaacttcaaatggccataacttggccatttgaactcggaattggaccgttcaagtctctaatttttccttgagaagtcaagaacccatttgtgtgctttgttcctgcttgttatatggagtttattagagtaaaatccttttcttttccgttggtcatgtagacgctacagcttcgaaagatccgctcttcgtggaggttgaagccgacgtttgggaaagcgagcaaggcaagtcacatcatcctttaacatattgaatcccattttataaaattattttgatttaaattattgcattatcgctttatttaaattcccgcgttatcactgttttatttagccatgcctatttacctttgttatgaccttattattattactattgttattattaccttgttcaccctagaataaacaaaaccccaactagtggacactctactcgtggtaccgctagtatgaatttaggtagatgcttcgctggttagttaggcaacattaggtggttttacaaccctagactttgggaatattctcatcacctggacactatggaatggttggattatgttggattattgtggaattggattcacacctccccctgtattcaaaatcctcaaaatggttttaggctgggctcggggtgcatggttttgatagtagcacctcggccatataaggaccggtcttcgggcctctattgcaaagcactaccatacttccacatgtctagtgggtaaggcttagtttgtggctcagtctggttataaacaaaagtacacggatggagatggacgaagtcgggggtcaatggatatctctagggcaaatgaaggctacacgagatgcggcccggtagtcgagatgtcatggcacagggctggtgtcctgctgctaggggctcagtcctgcctacctgtcccagaggttccggccgtaggtgggattgggtcggtactcttgtctatggctaggatgggttggaaactatgtcacgtcttccgtccgtataccgtggtggtatgtggcacgtggttacacgtgaggaagatgtgtcttgtgggtaaagatgtacacctctgatcagagtataacctattcgaatagccgcgtcctcggttatgggcaagccgagcaatgtacccaagttagtgttttaattcttaaaacctacttaacaactaaaatgtggaatggttggcctgggttggcttgggacgagctgggacccaaggtcgggttgccagttcggtctgaatcatcgtaggccttgggttaaggcaggttcatgtgggtttacggccttgattaataatattgtatagctctaggatcatatttacaaaatagctttgagcaactaagtgtcttttaatgctgtttactgcaaaccctaacccctatattatggctcccttgtactcccttgcatttattctacactcgtgggtgtgtcttgttgagtacggtggttgtactcagtcttgctcaatttttcccaaacccagaagaggagcccctggatgatgaaggctttggtgtttagctcgtgcctgccgtcaagcgcctgtggtcgtcgccctagtcttccgctgtttcccgtttgtctttgtgtgtgctgggccttcgccgcccatgtaataaagtaactatttacgcttccgcttgataaactctgaaatgtatcaacttttggtgtaccttgcctcctgggacaaggaataatacacgcacgaaaggaactcccgttgggatatttccggtcgtgacatccgggctcggccggcctccgattccgatgaggatcgggagccgtcggcctaatcaggccggcaaaccgccggcggacggaggggcggccgtggcagcagtggtggatggcaacagcggtgggtggtggattgtggatggcgacagcggtgggtggcggattgtggatgcaggcggtggtggatggcggcgaatatggaggcagcagcggcggcgcatcacgcgtcggcgccacaacggggagatggcggcggcagatggtgcggcggcggcggaggaagggcggtgccccccctcggcgctccctcggcggcgtcggtggcgcccaacggcggcgtcgatagcggcgaactggcggcggtgggcggcgaaaagggcggcggcgacgaaatcgtgggggcggttagggttaaccctaatccccccgacggctcccccctgcctttttgctgcgggccggatgggccgacccaccacccccccttgcctgccggcctagtgccacacggtggtgggccgaatcctttagattttgtcccaccacccaatttaccatttaattttaatttttaattttatttgcagcagcaattacattttagtccctatgttttatggaatttagtcgaagcagttcatcagttgtacaaacaattatgtaatggtcctatagaccactgatgttatgtgtttattaacataggtgtttatttaaataccatgtttcactaaatttattgttgtcttaataacatgccttttgcatattatttcaagacacgctctactttctcgctttattaatctacaaaattctataaattttgtactttgatttggcaaattctcttaattatgtacaacatgattaatggaggatttaatgcatgttccacttcacactttgacttggaaattaatcacatatcgatggagtcctatactttggttatattgaccataacttgggcagcgagtatctcgcccatcatcaagtggtctacaatttgagatgattacccgatggagtcctacaaattggccgcactggtcataacctaggaagcgaacaactcgcccatctcacagaggtctacatctcacgatgattacccacatgtgttattttccgagaatatgttttgaaaaatgagattatttgaaatttggttgagcacaaggtagtggagtcctaaacattggctgcggtatattcactagaatatatttgcctggagaccgtgtattaggcagcaagtataacttgcccactattaagagatctactccactgtttaattacttggagattatccacattgtgccacctaatttcgaattctaactcaaattgtcaggtctattacctgcattttttcaaaacattacaaaatatgaagtattacatttcgcattgagattacaaccttaatatcatgtttttattaatttacctctataaattgataatgttaaccatgattgtagggacatggcaacaaaaaagttcgacgaactcgccctcgatgggactaactatcccatccgggcttctaatatcaaaatcaattttgcctctcgggggattttaaatacaattgaggaacctaatgatggggacccggaaattgagcccaggaagctcaatacagccctttttcttttgagactctacattcacaaggatctcaaacatgaatacatgttagagacgagccctctcaacctttggaaagctctaaaagagcattatgatcagcaaaaggaactcatttggcctgaggctaattatgagtgggttcatttacgcctacaggactttaaaactatggcaggatacaaccatactgttcataacatttgttccaagttgaagttttgcgaacaagagccaacggaggcaaagaagatagagaaaactctatcaactatgcttccggaggataggatactgactcaacagtatcgcactaacaatttccagaaacattctctgcttatacatacattgactcaggcagaaagacaccatgagctttctttaaagaatgcccaacagcgcccaccgggctctgctccactgcctgaggtgcacttcaatgtatagaataatgctgagaataagaaagaattcaagggaaattcttcgaataatcctaagaatctgactggaaagcgcaaacgcaacaacaacaggcgcaaattcaagggtcgaaagaaaggaaaagggaaggataaggcaccacaacctcgtagcaatggcaacaagcattgcaacatgtgtggatctgacactcatgtcgctaaagactgccgcatcccgaaacatcttgttctcttgtacgaaaaatccctcaaggacaaaaagtcttctgaaaacccaagatttgaagcccacttcaatcttacacataaagagcgccctgaggttgcaagttctcaccaggctcctattgaaccagagagcaacctcaatgttctcccagaagatgtcgctccactctctgcgatggacgatatgttcatcgaatactgctcaacggatccacttggagatttgcaatgatctcagtgcgtcccacttggagatgaagctgctcttatcttagtgtgcttgaaacagtatattgatatcctataagtttgccaaacaatattggttgtaataagtagataagtacgaactcccttatattgtaagattatatggcttgctagtcattagagtatgtactattagcataatgtaaatgtcatactatgtatttgatgttttaattattgtatgtatgtatatatattggataaagaattcttaatcaagcaattcttctttcattatagatgtctaaggatatcactccgattggagaggaattatgtcttgtggacagtggtaccacaaactctatacttagggagatcaaatactttcaaactctcaaaaatagagaaggcaaagttttgactattgctgggcacgatactgtgatagttggctcaggacgagcaattattacactcccaatgggtacacaaattacaatcgaggatgctttattgtatcctgattcaacccgtaccctactaagttatagagatatccgtcaaaatgggtttcacattgaaacccatatggataatcgagaagaatttcttctcttaaccaaacaaaacggatatggcaaacgcatttgcgagaaaattccatcactcacatcgggattgtactatgcatacattaagcccattgcacatgttgcgtacaaagtaatttttcaaaatgttgatgcattccacacgtggcatgatcgacttgggcaccccggtatcgggatgatgagaaaaattattggcaactctattggtcatcatttgatcactgacaaatttcccaaatcctctgatttcgtatgcactgcatgtgctactgggaaactgattttgagaccatcttatctcaaaattagagccgaaccacttaaattccttgaacgcattcaaggagatatctgtggccctattgtgccaagatctggaccgttcaggtacattatggttttgattgacgcatctactagatagtctcacatgtgtcttctatcgacactgaaagttcaagtgccattaatttggttttgatgattaatgacaaatccaattacatgagactaacattgttataagcatttctttgtctactagtctcatatggatatgaaagtggaatatgtgagaggtgatttctggacttcatatgagttaagagagaaacgttcattgatggtgtacctaaatcacaaggatgaaatgcatggagatcaagctatatgtatcactctttctatccatgcacatattgatatattcatatataatattttcatgtgattacataagcatgtgagactaatgttttgtttgagccatatcttgtttagtctctttacattgagaacatggagatggtgaaggtatgtttttattttattgtctatatttgataaatgccttctattcttgtataggataagctctcaatgtttaatatcttgttatgcatactcttgcttcacacaaatattttgtatgcatatatttagggggagcaaatcctatactttagttatgcatgtaatcgatccaagttattcaccttcatttaattgggatctttacatttgaatatatatttgagtatatgacacttttggtgttgattaatactcattatttattcatatccttttatacatgtgatcggttggtcaacatgtggaggttgacaaccggatcattgagactaataattttattgagttgaatgaaagaaataggtcccaaggattacaaaggtgttgatgctcaagtgatatcattacacctaacaataccaagaatgacaaagtgaagatattgaagatgtgtgatacgaagtggctattatggcaagacggtgaagggcaagcgatgctcggtcgcgatggaccatgcggcggtgaagggcaaacaaggggcttggcgccgaagaaccaaatccggtcgtgaagggtgagtgacggctttgtcatgatggaccgtgcgagaccatttgaagctacaagtaaccgcatcaatcatttgaagaatatatggtgaaacagtatcggcattggcatccctcaagacaatgaaagaaagatgaaaaaaaggcattcctaatggtataattatcttcttatttacatttgagtttaggaatgccgtactattaagagggatgcaacgtcgaggtgtttgtgtatgtctcggtgctcaaagtgacctatcatagtgctaccttgagagaaacccaagctttaacctatcctttgagtggttttagaccttgtttttggttgagttgggtagtcctctgagtgagctttccatagagtctaagattataaaaaatggactcccgagcgaaaagttatagttgttttactctgtgcttttcggaaagtccgaaaaattatcggaaactccgaaaagttttcggatgaatccgaaaattttcggatattctgaaaatggctgcgaatctgagatttgtttctgtaagttttcggacttgtccgaaaatgcttttcggaaactccgaaaattacagtcttggcctccaacggctagtttttgagaggctcgggtatataaactcctccacccctcctttgagtggctgctgctcttggggagtattagacacatccaaagccaaatagccatccccatttccctacctttgtggtgcctctttgtgagggggatttgagaaggggagagagttggattgagagagtgaggagttgagaactagtgagcttcactccatcctttgtggtgcctctttgtgagagggatttgagaaggggaaagagttggattgagtgattgagaaattgagagctagtgagcttcactccatactttgggcactcgagttcatagcaagcaaatcttcgattgtgtttgttactcttggggactaaggtctcctagacggctaggtgtcgccggtgagcacccaaggttgtggtgtgccacggaaagtttgtgaaggcttcgatttcgcctccgcaagggaagaaatcaagagtgaaaccgaggagtgcatttgtgcaacctcgtgaggaaaggattgaaataggcccggcccttgtggctcctcaatggagacgtaggatccgtgaatccgaacttcggcaaacaaatcacgcgtctcctctcttggtttgcccatttgtgcattctctcatattgtgcttgagcttgtttttacccgatctacttgcatgcttaattgatttagttggtgaccttatatcttgtttagataccttatttgtcaccttttgattcatattcattttgtttatttgagctacaagttcatagctagtgctttattccattatccgccgaacttttcggttgagaccggaacttccaatctcatatcggaagttcctatttgaaccgaaagttctcatcattctaatatgctataaagttgtgataatttttaggaacgcctattcacccccctctaggcgacattaaggtcctttcagacacgaaaccatgcctttgccaaattaatgtctcaaattataaggctgaaggcaaattaccctgaacataggattcaatcaatccgtatggacaatgctgccgaatttacatctcaagctttcgatgattattgtatgacattgggaattcaggttcagcactctgttccatatgtccacacacaaaatggtttggctgaatcgttgatcaaaagaattaagcttattgctcgaccattattaatgaattgcaaattaccttcgtcgtgttggggtcatgcagttctgcacgttgttgaccttgtccaactacgaccaactgcatatcatgaaacttccccaatgcagttagtacgtggaaatcctctaagtatttcccatttgcgtaagtttggttgtgttgtatacataccgatctcaccaccgcagcgtaccgctataggcccacacagaaaagtggggatctatgtgggattcaaatctccatcaatcataaagtatttagaacccttaacatgtgatctatttactgcccggtttgctgactctatctttgatgatgaacatttcctggcaatagggggagacttcaagtaccagaaagaatgccaggaaattgattgggatgcctagggtattctagcctcagacccacgtactactgaaactgatcttcaagttcagaaaattatacatttgcaaagacttgcaaataatctaccagatgtatttaccaattataaaggtgtgactaaatctttcattcctgctcagaatgcgccagaaagagtggaggtaccaaataaaaccactcaacttccactcactaaaaagagaggaagaagtatggccaattagcaagaaacaattgctaataagcaaagaaagatggtaaatgcaaaccaacctttagttggtacacaccaaattgatactatatatcaagcagatcgtgatagtctgcaacctagctcggtggtgcacaatgctgagactaggaattcggaagaccatagacacattgtttcgggagatcacgatgattctataggggttgatgaaattgccatcaactactctgaaactagagaatcttttgatagaagagctacaattgtcgacattaatttttctgaacaaattgctgattgcctccaagttgatccagaacctaggtctataaaagagttccaaaagcgctctgactggaacaaatggaaggacgcaattgacgcataattcgcctcgctttacaaaagagatgtattctcggctgtaatgcctactcctcgtagtatctttcctgtgggatacaaatgggttttcgtccagaaacggaatgaaaacaacgaggtggtgagatataaagcaaggcttgtagcacaaggttttacgcaaaaacctggcgttgatttcaacgaaacttactctccagttatgagtggtataactttcagatatttaatatcattggcaatacaaaatcgtctatttatgcagttgatggacgtagtgacagcatatctttatgggtcacttgattctaatatttacatgaaggttcctgacggaatcgacatcccgaatcagaaggtaaatcgtaacatgtattgtgttaagttgcagaagtcattttatggcttaaaacaatcgggcatgatgtggtacaaccaattaagtgaattcctttcactaaagggatacactaaaaatgatgattgcccatgcgtcttcatcaaaaagtcccccacaggattttgtattatctcggtatatgtcgatgatctcaatatcattggcaatacacaagatattaatgaagcacgtcatcatttaaagacagaatttgagatgaaggatttgggtcaaaccaaattttgcttaggtctacaacttgagcatttaccttctggaatccttgtgcaccaaagtgcatatacccagaaaattttggagaaatttaatatggacaagtcatatccttccaaaacccctatggtggttcgatctctagacgtggagaaagatccatttagaccaaaggaagatagtgaggatgtgcttggacctgattttccatatcttagtgctattggcgcactcatgtatcttgcaaatagtacgagaccagatattgctttctcggtaaatctattagcaagatacagcgctgctcctaccaaatgccattggactggagttaagaatgtctttcgatatcttaatggcacaagagatcttggacttttctttaaaaagaaccaggattcgactttaattgggtatactgatgctggctatctatctgatccccacaacgccagatcacaaacaggattcgtatttttacaaggtggaactgctatttcatggaagtcttctaaacagactctagtagccacttccacaaatcattctgaaataattgcattatatgaggcatcacgtgaatgtgtatggcttcacagaatggttaaccacatattaacatcttgtggtattggttcattggaatcacctaccattatctatgaagataatgccgcttgtattgttcatatggaaactggttatattaagagcaacatcactaagcatattgctcctaaattattttatcctcatgagctttagcaacatggagagataaacatcttgcaaactaagtcatgtgataatcttgctgatttattcctaaaatctctgccatactccacattctttaaatgtgtcgaaggaattggtatgagacgacttaaaaatttgcaggattcagggggagtatcttcctttggcaaataacctattttcgtcatattatactctttttcctttgtatgagttttaccctttaggttttctcatccaaagtttttaacgaggtaatatcaacataagcttatatgtcttatcatttggcttttcctcactggggtttttactaaatgataactgtagacattatactattttggatcatactatgagctttactcatagatctaaaatagtcaataatatatatcacggttctctccttatttttcccactgggttttcgaggagttttacgtgatgtatttaactataattatttctaagattatctttatagatatctggaacaatgaaagaacaatgatcaaagctcaagggggagtgttatgaaacaacaggtgatctcatccatataaaaggatggatcgcaaccgaaggcaaccgcgtcttccctaggcgctccttggcaacggacgcaatggttcccaaccatcgcgtctccggttgccaccccttacccatctatattttgtaccgcattgatcaataaaggatcccgctcattcattccctacattcttttgtgcaattctctctcgctcaatccctctcgctcaatcaatgttatacactttcaacacataggagtaatgaccatcaataaatgaaagaaatgtaactcacgacctgaaggatggtagagattaaactcaaaaaagatgatgtggctcaaggcatattgtgtatataagatactattagattctccatgctttgcagcaggaattattaagtaatctttaaatacatatatttttttgtcaacaatcaaactaggagtacaaaggttattagttattaacaacaattaaaggtggtttgaaaaatccatatttagagataaataaatttaatagactctataggacgttatagatgaactattaggacgtttgccaatatttgcattgcaagaaataaaagataggaaaaaaatactaaaaagtcaaggtttattagtactaatcaagaaacaaactaaatggtaccccgtgctttgatgcgtattatatggatgaatatatattaagtattataaaattatagatatgttgaaatattatagaaatgatgtgagggtggtaattgaatatgttgaatgaaaatttgtagaattcaacaaattgtaaatgatgttactacatgagttttaataagcatccctccggttccataattcttgatgtttttaaaaatgttgaggtcaaagttgtataactttgactatttataactttaaaactatttagtttaaaacagtaaatcaatgttatattataaagtactataataaaaacaaaaataattaattgattacatatattataatagaaaaacataatcaaatgtagtatatctttcgaagaccgtgcgattatccaaaacatcaaaaattgtgaaactggagagagtaattattgctggtgaataatgatgggtcatgttttcatgtacagttttaggtttatcgggaagtagtcagatggttttggagttgatgagaattctgtcaaaccggagggtgtgaagtgaaaaaagaaaaaatgaaaaaaaaaggccttctccagtagtgaagctcgtgctggaaatttcctaatatcccctacttccgatctcaacgccggcatcgtctcgccgtgaactcgccaagacctccgccgccgccgccgcctcatctcccaagctcctccgcggccgcgtgacgggaagcggagcgggaaaaggaggatccatccgtccggtacacgagctcctcgtcgacgccgccgggggagggagggagggggaggatgatccttccgctggcgaagctggggacgctggcgctgaagacgatgtcgaagccgatcgccatccgcctcaagacggaggccagccgccaccctcagttccgccagctcatcatcaacctcgcccaggtgacgcgggcccccgcccatctccccctcctctcgtctccccttccccccattttgttcttcgttgtgcgcttggaaatcgtcaggccttgtgaaaatttagcggtagaaatgcagaataggatgtggagaggattttggccgccgagggtttggggtttccccggccttgtgatcgcgtagcgcagttttactaccctccgaggaatgaagggtttcgccgttgtgtgtcaaatctttggctagggtgaatgttctttgattgctgaattctttgtgatatacttgttcttgtttttgagctgctccgcaatatcaggttattttggctagcttgtacattttcttgcggccatttcttgactttgttgattgagatacgcagaatgggattcgttatcagaaaattatgcattgcttccaaatgagaagggtaactgtacttattaatgagaagtctgaatctgaaaagtgcacttttagtaaatatgctagtgatcgaacaattctgctcacaatttgtcgtccctgcatcctcctcagctgttacttctttctttaactacttcaaataacattttggccacgaactggttttgtagacaaatcatcgggtctccacaaatatccagagaagaatatatggccattcaactaaggttgagattcggcctttgaacgaggagaaagctgttcaagctgctgctgatcttattggggagctctttgttttctcggtattcacaatcatgttttcttcttattctttgctgttgtaatttcggctttcgatttttgcttaaattctttaattttcaggtgatgattatcttagtgtcaggcaaaccgtacttttatgtgatttccatttataaaaaactggaaatatcctcgagacaagtctgtttttttgtagaaataaagaatgcataagaacatttagaaaatctagccacatgttacttcaatgcatgtcttttttgtaaagtttgctgattttattggttaaccatcacctatgatcccatgtcaaattatgacaaatgttgccttcctgcatgccttctatatagtttgctgttgttttatttttgccattcactaaacttcagcaacccttgtgtagtaggttgctggggctgctgtaatctttgaggtgcaaagaagcgcaaggtccgaggcccgaaaagaggaggctcgtagaaacgaagttgaggtataagctctggaatgtcaatagttttgtaacttgagatgagttgtgtcttcgcagggtaatggttttctttttgttaacgtccacatatttcatttcagtgactatattcatttatgtatctataatctataaataggagcccccccaaaaaaatcacatagctcattggtatatccaaacaacaaattgtctgatgcagctattcaatcttaggattattctaccaaatgttactaaaaaaattaatcagttcaatggcctgggaataattggggatgaatagctattgtttacattgctgagaatcgtcaggatagctctaatatttcagtgaagtcttgcaagtgataacaaacaaggcaatgcttgggctatatcttggatacagttgtattcttggagtacactccagtataggagttattacattctaaataatgtgtagaaggactgtagcagcgaagtgctctaatattggatgacagcgatataagagacacaaagtgcttacctttattgtctgaagttataaatcagtcaaatgtaagtagactgtcttgtctgaagtcttgtagtaatgattcaattatggaggatagcaactatttgcaacaaataatcatatgtaaacctgtactgcattttcaccaaactgttgctatgaaaaccaaaaatacatttataccaaagctatgctacacaccttgcagtacagtagccctaatgggttgtaaaaggccatagcaagctgcaaccatacagagtgctgcagactttgcctgcagttagtatcaggcactacaccttaattctaaaccagggctattgtagtgttatcatggccttttctgaacattcaataggtatcagatctgtgagcaataatatggcagcaggccaactgttcttttttttcctctaaaattggccatttatagtttttgttgcattgcatattttttgaccaatttacattttgcataaatagtctagaatttgatgtttcagcaatatcacgtcgttgacttgttctttgctgtttattttcattgttatgctttatatcattcaatatggaccagctttgtggattgtctttttcctgtccaagcaagtgacagttaccagacagatctgtttggtgtatgcagaagaggtagtactcttctctctgaaaaggacaagagaacagatagcagtctgaaacactggaaatatgccttaggttgtggctttgtgagaaccagagatgaatgaaacagaatcaagtccaagagtaatgtattgctatggtatcccataaatcccaagtggaaatgaaattcctatatgtaccatatgaaactgaagtctctgcaacaaaaactcactatcaataggtgttgaccagagaacatttgatgtcaacattatcttcaatgtgcatgagtggctctggttagacaatgcattgcagtagcatgtattcataaatcatctggcctttgactccagttgttaatgtgctttgccattatgtgaccgtatatcttcagtcttgctgttggtgatgttattgacttgtgttgctattttttgtcgattatttctatcattttatgagtttgaaaaaaaaacatttattttgtaggcgttgaggcaaaaggaggatcagttggctcgggagatagagattgtgaagcagaaacttggcgagatagagcgccaagctaattctcgaggtctctctggagttcttttcagaagcagcagtgctccagaccaaacaaaggcctcatgagtttgattaactaggacaaaggcaagacttcaatggcagcatcacaaccaagttaatcgattactgtcctgcattgcttgtgatattgcacatggatgtgcagatttttgaagcacacatcttgtagcttgtgtttttcctgccaatcaccatgggaatgggcccatagcttgaggtttcgaacaacttgtcgtatttgaggctattttaactcgaaagcgttggagagcagttccaagaagggaacatctggcaagtgcaaagcagaattgtgctatgtgtgtgttgtctggcaattctcgcgagttgtcaacttgcatcataagataactgtatgccatgaacttgtcaacatgggaagcagattgctgccaaagtacttctggtttgtaactcgatcatgttcatatcagtgtattacaaggtaaattatgccttccctacataggtagctgctttcgcaaaatattcagaaaaataatagggtgtcaaataccaatatgattaagaattgccaggagaaatcgaagtccagataaatacaggctgctatggccttctgcactattgataaccttgcaccaactaaaacctaaacccacctaaaaggctgctgttgcatgtttggttggcactcacataatttggttgcaacaattgcttatcttttagctatcttaattagttgcttttctgataggaatcaacatattagttaggccattagctcccatagcttgcaaccatcacaatagaataccccatggcctatgggtcttcaagaaaaaaaagcatttcataatccaaaaaagatgcaaaaggatgcctttgtatacgacattgatgagataagcaatacagattgcaaaagtccaatttgattaagaaaggtatcaaggactctcaacaactaattgtactggaaagacaaaaaagtaaaaggtagtagctacagagtaaataataatcataatatatatatctgaaccaaccaaagaacacttttgtaagaatcatcagaggtagtactcaagaagcactgagctgaatatttcagacccagcaaattttgtaacccaaactgcatctaatctgcaacacacaaacataacacaacacacactgtaaaaataatacaggtttcctgcggaatacgccaatcttgctgtttatcactcataggatccagcaactcctctgcttcctggtgttcttcttcttcggctttggcgggcaaagtacaactttgatcgccgagtcgaatactgatttcacattctgttcatcaagatatcaatcaccattaaaaccgatacaatttttttttcttgaatacgcatgagatctgcgtatcatttcattaagagagaaaaaaaaacacgagaaggggagctgaaaagtcccccactcaccccaaaacacatacaaggcttacacttatactatagcaaattatgaggacagtttcagatatataataagtatgtacttggttcccgttgcttctatattatctaaccggctttggactacctaaaagtagcaccagcttggtccatactatatataatgctgtgtggatgaacaatgtcaggtagcaatatctctgaactaacaaactaaatccatgaatggtacagtactgttataccaactcgtccatgttcttcatacctgctgcgtcttggagctgcattcgatgtacgccgcagcacctatcatcctcttcagctcctccccctgttcatgtacagcagcaggaagggctcagttgctgtcataccaaattctgatcttaatgtgcaagattgcaaaaggtgattattgtgttgtgcacatgaactgaaacgtagaaaaacttgagcatatgcctctcatattgggtggagtatatgatacttgtggatttcgatcacgtatcgctttttgcgttgcgaattgttatgtttttaagttgaactgacctgtgcagtggaaataggtgctagaccagggtggtccaggaagaactgcttgtcctcacgcaagtctgcaagtattcggttcttatcagattttgttgccaatgttttttcttctgtttgtaaaaaatgccaggtcatcttaccaagcttggttccaactaatacgattggcacattaggagcataatgcctcagctctggtatccactgctcaacatggggggaaatgatttgtcaaaattaggagaaagtattagggagaaaatcaaagagtagttttgtagttgagtaatgtgtaaccttcttgtgaatattctcatagctcgctttgctgatgagggaaaatgctagtaaaaagacatcagctcctctgtagctgagaggcctcagcctattgtaatcctcttgtcctgtaaaggccaacaattagttgtcagaaaatacagattcgatttcctcaacgcggagaaggttgtatatttgttttgctatttaaaaaaaaaacaattgaaactgatacagttttttcattaattagatcacctggttttttgtatgatatgctgataactacagaatctaaagtagtattcgcagagggaaaatctgaatatactatggacatgtactatgtgtcattataagaaaactagcatcaagtgcaggggcaatgaaaatccaaaaaaaatagcatgccatgataaaatctataaaattggacttctcttctaaatcagttatactactaaacaaaaataaaaaacagaacattgaagcatgcagacaaatgtgcaacttttttttcctgaaatccaacacataccagcagtatcccagagcccaaggttcaccgtgttgccgtcgacgaccacgttggcgctgaagttgtcgaaaaccgtcggcacataatcctaaccccaaaaggagaaagaaccaaccatgagaaaagcctcaagattcagcagaagccaagaacaagaacaccatggagctcagctcaccgtggggaaagtgttgctggtgtaggagatgagcatgcatgtcttgccgacggcgccgtcgccgacggtgacgcacttgatgaacctcgccgtgctcatatcgtcaccaagctcttcttaatttgcccctgaaaacttgttcttggttgggtttggtggtgaagtggtggtagtgatggtcctgatggatgggtgggcaagaggaatgggcaatatatatatgtactaactgctactgctaccttgtacccggttgtctgaaacggccttgacaattactcaaaggatgctggggataaaaggaagacagattggacttagtgggcattctgttgggatggttagtgattagtgctgtggtgtctcagctcactatcaatcagagctcatgtgtaatctttggaatgagcggcagtgcaggcggatgaagcagatgatgatgatgatggggggttttgtgcatgcttgcttcacaccgctagatggtccccaccaaatcggccttcaaatgacgcgcgtaataatgttttgatatggcacaagtgatcattagtttataagcaataggggttgggggttgcgtcttaactaaaccatgtagtgataacccccaagagaattgggttaaaatacatatggtttatgatgaatgaagcttcttttattaagaaaaaaaaacacaaggcaaccctcgaaccctcttacaggatgaatgagggtttttaatactcgaaaaggtaccacaagttaacacgcgaatttatagttttttttctattttggcaccttaatattgttagagaaattctatgatttattattggcaagcgttcaattatatgatacatgatttatcatcgataaacacaaggcctataatatgcctaagggtgcatttggaagagaaggctgggaacttctcccccgcacatctaaaacagggtggtttattagtgtatgtctgtatgattaattaatattagaaaaaaaacttgaaaaagagattagtatgattttagctttcttatcgaacctttttacaataaacacaccgtttagcctcgttttgcacgcacacgcttcctaagctgttaaatactattaattaaatagtgtgattttttttaaaagaaaatataggaaagttactttaaaaaaaattatattaattcactttttaagatttttcagctaatatttaattaattatatgataatgagttaccgtgttttctatgtggggagaagtttccaactcctcccaaacacaccctaaatggttttcttccccttttgctattgccatccgttaacctccactagctctttggttttttttttcataatgccaaaaaatacattaaagagatttgcaacatctactgctattttacagccggccgcaaataaatcaactaaatctactattatttcaatgttaatgaaaaagaaactaattgaatcttggcttgcttagtacatgttacatttttaggggcaaaatgttcatttcgtaggggctaatggaggtgaactaatggttaaatggcggcaattgcaaaaagagaagaaaaacacttggataatgacatatttatagagctagtgtttgttaatggcaaatcctagaatttctcttattattaagatactcagaggtaaagcaaattaataacaccaagtgagacatccacaatacctcttcaacaaccatgaaaaaactagacaaaatagtcattttagttttttgtctttcttcatgatggtgattgcacattgcccttaggtattgtaaacaagaggggagatctgtgatggtattgttttgttgttaataatgaagatgaattcaaatccactactctatatcaaggttaataattacttataactatttttttcctacgattaagcatgacgaacaaagcattaattcccaagcttgcaagccaagttgggttagcttaaggatcccaaatccttagaaaaaggtctatatgacaccatgttaaacaaatttaaggaatcaatcaaatttacgatcttatcggacggaaaatcaataacttaaattaagagtaaattttacgaaactacagatacttggatcaaattatcacaaaactacagatttaagaatgtgtatcacaaaactatagatttagcgtcaaacttttcacggaactacagctttaatgcaccatatcacaaaactacagatttagtgatgaatttatcaaaaaactacatattctagagtttagatcatagtactattatttatttaaagttataaaatttgtagttttgtgacaaaatagtttttaaatttgtagttttgtgataaaatagttgttaaatacgtagttttgtgatataataccttaaatctgtagttccatgataaatttgatactctgtagttttgtgaaacatattcttaaatttgtagttttgtgatagtttgatcaatgtatctgtagttttttaaaatttactcattaagagttaattaatctccccattttttatatagtgctaatataaaaaagacttacataaatacatttttccaatatttttataagtacacaagtacaaaatccgaaacgtaacctatagctagaacaaaaacccatatgctcctcatatgcctatatatgcatgcataaactcattccaaaacccaacaattaattgtatgtactgcatatgctgggtaaagttgatacatgcatatcaggatataaatttcctctctcttctctgttcacttttctgatgcattctgcatttttcgctgactaacacagcacagcacagcacaacaatacaaccagtggatatatgaggtagcttggccggcggttgggacagaatgatagtacgagcaccatagctggcaatggcatattggcattagctgctgccgcctttcgttggtgctggcagcagcaggcaggttttgggtgcagctagcagatagcctcctttgcttttgttgctttgagtgcacggccaggccagtccacggccggaaaccgctctactacggctaccgcccggatcatatcattccatgtttatccccatccaattcagcttctcgcgcaactttatggtttaagtgccggttggttggttaattgcggcgagatggcactagcgatcgatcgatcgatgtatgcatttgtttaattatgatgatgccaagacgctgctgcggccacgggtcttctctgaatgcatctggatggacgcatgcacgtgtagttgcgtaggttcaacttaggcgtcgacgtgttgtacatgaattatttctctgaatatttgatattgggattataataaattaatacgctcaatttcacatctgcttgactgtatggtaggatttttttctataaagttacaatcacaaacactagcatcttaagttgtgttcacacgaatatgacctctgcatctattaaatatatttatatattctttatgttaatggacataaatgtttaataacaattaataataaatatgtttttaacctatttttttaaagaagtgtagctataacattaatggatttatatatcttgatttgccattaagaatatcatcgtaacaataaataatttatcatatattacctcgaccattatctcctacaatctctaaatacgtcaattttagtaataatgtaaatagccacatttcttacgcattgcaattctgtcatcactagttgagaagtatctatacggttttttatcgtaaatcttataatcatatgatttaaatcaactttgaaaaatttattatgtcatctatgtcacatgttttttttaattttaagttgtagtgaagtaatcaatagtattaagttatgcagctattcatattttcacagatagttgttatttttaatacagtataattactattgaatactatgattattttataaggataattttgaagatattttttcattcttatacctttgttacctcacattttatgggatgtgcttgaagggtctagaaaatctcatgacactatttgcttctttttttaacttatttttttctttttttttattcaacggttctcttcattcatatcgtgcatccaactgttcatatttattcgatgacgtggctcatcctagtggaattttgggatcccttttcactaacgtagatatgacacaatatacttataatataagttttccgtgcgatgctccaatgtgatatgaagtccgaatagaatacaatttttccacatgatacggagtccacttatgatagagtagcgtgatatacatgtttgtatatgtgaaaaagaaaaccataaaaatgtagtgtatgatgatcccaatattttcttatattggttttaacagttgcaacacacgggccattttctatacaaaaaatcgagatgaacaaaaaaattaatatttctttgggcaaataaaatgcaagacaaaataaaaaagaattacattttttttattctcataacatagataattctggtcttctaaattatatgcctaagaaattagacagataaattgtttaaagtaaaaatagacacctccatcttttaaaatttatcacgtggttcgtactcaagctccaccattttaatatcagcttgcacaatgcacagaaacgcgcaatagctaaccctgcagattagggtatatgaccacagctttgcatatagagtcatcttttatggaggatgctcgctccctgactccctgtgcgtgcaaagatatggcactccttcagtttaaggtggtgtttggatcagagactaaattttagtcctgtcatatcggatatttggatactaatttagagtattaaacatagactgcctataaaattaattgcataaataagagataattcgtgagacaaattttttaagtttaattaatccataattagcacatgtttactgtagcatcacttaggctaatcatggattaattaaactactcagtatcgacattaatacgatgcagaaagaaattacaaaaaacaaaatttaaaaatagccaaaaacggtacggtcggaaacggtacccctaaaacgaaaatggtgcccggtcgatcgggaatttccataaccgttttcacccctatctacggctaatagttgtaattagtgtcccaatatccgatgtggcagtttagtccctgcatccaaacgcatccaaacaggccctaacttagctcacccaccagattatgatgatacggtgaccggctatcatttggtagtgtgtacctttgtgggtcgtggcttgcctgcctctcttgtgtattaagttcttatgctaatgctactctaccagtactctctctctcctataaaaagtccaaccctatcttttcaaggtgaatataagggaagagataaataaccaaaatatccctaataaatagtgataggtgagtaggtgagaggttgtaataccccgtatattaaaagatatttaggtttttttagtttgggttgacttgttaaaataaagatgttaacagaaataaataaaagaaaaatatctttagaagtgggctaacatgagaaggaccataaacccaggccattagttctcccctaaaacctaaagagaggggaaccgaatcccacctcccctcatggtgccgccacccctgtccctggccggcgcctcctttccctcctcctgtgttcgcatctctcgccaattgctctccctagatctccatctgcatagcttggatcaagaagcgaagtagaaaaacggaacgaggaggaggagaggagtaggaggggttagaccggagtctcccctattgtctcctcacaagttctctaaagaaaccctaggtgagacttatcctcttgttgtatcagttgttctagcatggctttagtgctttaattcgtggttagggaaggctagagaaggagtttgggtagttgcggttcggtttgttgcagctttgcatgtgggcagatttgcagtgcttcagtgtttcgatgtttcggagctctacatgttattttctgcaaaagtgtttaactaggaagttgtagataatgtttgaatctatcttctgaccaaagggcgtgattttatctcaagtggtttaggagatataattttttttagtatgactgttgtttttgtgtcataatctagatagtagtagattgaactgtttttgaagggtttaaacaatgtaatcagccaggccgcctatagacaaagttgtagagttttttcttagctttccatatcggtaaagtacaccctgattgggcaactagaactccagttatggttgtttagtgtggacagtctgaaattctggacagattctgaagcctgctttcaagcgcaaattagaccatttttatggcagaataaaaatatgctttctacatcaaagttgtaggtattgttctgtagattttcaaaatgtatatattttcagtcatagccttttcatatttcaagatataaaggtttgaaacagtagtcttgtgtatagtctaagtggtgttccttgttattgagttttgatgggatggggcagtaggttcacctttttcattgttttatacgcatgtttggatgtgtttgctgaggttttgtttgtgattaggtggtggtccatcagatcgtgcatgataccaatccttcgttggaggcaagtgcatgacgaattaattgtgtgattcatggattgtttactctatctatttatgtcttatatatttctacgtgataagtaactgcttatgttcatattattgttcacgccatttagatttcaagttaatcttatgtgtacgatgttattcttgttttaatattctagattctggttctacttaaataattcaagttccatgcttgccatggatgtgcaatatggtttcaatttggttctttgattccggtttcaattattcaagtaccatgcgtagtcatgggagtgcaatttggttctttattcaagttcctgtgggtaagcgctgatcacgcttactcggctttgccggcaaatgctaggatgtattaactattatccgggatggaaactactatttcaattcatgcctgcccgggatgggaactactatcttctttgacttggtgtttgaaaatgtgttccctatcaaagaaagaaagccttttgttcatgctttattgccaatgatgtgtatatgtgttttctagttccatactgtacttgctgagtatttttatactcactcttgtgttttatttggttttaggtacatattaagaccgacatacatgggcgggaagtagcacccttatatacacatttatctgcacactatcaaactatattgcctaggtccataatgatacttaaactatatcatggttcggtcttgtaataatcttttagatttctaatagtttcttccccatggattataaggatggatcgtattgtgggaatgatattgttattaatttaacttataatataattgactgtcgtggatgtccgtatttacaggggagattctgctgaaatttctaataattttgggagttagtggtttgagtgtattttggtgtggcactttaggtacgtggttacctagggtgttacagaggttttgaagagataaaacttctcgatttgcggaccaatggtaggtaaaaagttaaaaatatgtttagtttttagacaaattttaaactatagaagttaatttattttagaataaagagagtacgtctcggagacaagacactcatgttgtgttgtgttgtgctgcgttcttatttattggtcgagggggaacgtcgagggcttgttccctttggagaaaaaaacatttatattttcaaggattaattcctacaagcatggtctataaggaacgtaagtataggaaaaaaaaatttcctttcctacagagagactataaaaaaattttcatctgctcaaattttttgaaaagttcttatagattgaagtgtgcatatatttctatttctatgggttaaaatttcttcaatcatcagttcatcggtgtgcagtgcaataaatactccctccatttttttttaagtttggtaccattaacttttagagataaatttgatcattagtattaaaaataggattcttatttattttgttataattcgtttttatcattacatgcacttttaacataacttattttttttgtatttgcataaatttttgaataagatgaatgatcacacatttaaaagtgaatggtgttaaacattttttttttgcgagggaatggtgttaaacattaaaaaaactgtaaaagttaatgatgttaaacattaagaaaaggaatgggtatatggttaactagaaaccaatttaaccaataggataatcgagctaattaagagagattaacaaaatgcaatgcatgtcgattgtgttgtgaacttatgtgattcgaccactttgacatgatagatcaagcttgcatagtgtacgtgcactgtgcttgcaccattcttctaaaaaaatggtgtcattagatttgcaatcttgcaatgaaaaatccaactaatcacagctacttttaacagtttctaaaatgtgtccaaattttgagcactcgcaaagtcccaagtcacatttgcactcagtgcactaaggttgtgtttagttccacgccaaaattaaaagtttgactaaaattggaagtttgaaaaaaaaacgttggaagtttacttgtgtaggaaagttttgatgtgatgaaaaagttgaaagtttgaaggaaaagttgggaactaaactcagccttaacaaaaagtcagaacagcaacaataacggctgacttcaggttaagtttacacaatggtttttgagagtggataagggttctggacttctggttccaccatgttattgcagacaagaggttcaaaagaaacggcagaagatagttaaggaattcctcctaggacttacggctgtaactgcttagcacttacacaaatttttctcatggtattatggtattattgctaccacacaaccgtagaattgatgttcagctagcaatctcagagtgatacgcagtgtattagtgcaatctagaccctgccactgtaaaaatgcactgacatgctccaggaagctttgctattgcaggtcttcaatcttgtcacatggttggcatttcaagcacttgcaggacatctttgaactcaaactcatgtggttctttgttgaagcgctctacaagcctgtacctcacatcattcaggtagaatgagtgagcactctctaaaagacatttcgcctctgaatcagtcagtttactggtgaaaacaacgtctcctcggataagcactgtatccttggtttctgcaaactctgtataatgagtgatcgtatagtaagggcttgcttgagtgccccttgctttgtagtcttcaagtccggtgaagatcatatgcggcatctgaactgggatgttcaataagaaagggtagaacaaaaggcctaaatattagaaaacgtgctgaaaattcaaaattctagtgaacttaatcaattaaaccagatatacagaagaggtgaaatactgtactcaaacctactatatatggttttccattgcagagtaacaggaaaacaaacaaatactactaccagtcaccatgaaaaatgaggtgcaggatactaaacataaagatcaaatgctgaaattggttacagcaccttagtttctacactaacttgcatgtggataggatattagacacaaacatgaaccatatcaaaaataaccaattactttacttctacaaacagaaaatggatcaggacgtgggttcatataattgttcaatttgtaaggcacatgatcaaaatattccaaagaataaggaaacttcacttatttcatttagtggtaatcaacaaaacatctgacataaagttagatacttccagaataagagttaaacgagatttaggttccgtccttgatcaaaattttccacaaaaaagggggaaacttcacttgtttcatttaacagtaatcaacaaaacatttgatatacagttagatacttccagaataagacgtaaacaagatttgatattatcttgcaattcaaaaggcatgttctacgtaagggactgaggttgtgttcatttcccacagttgggaactaatccctccaacacgtaaaacggagcgactcattagcgtatgattaattaagtattagctcttttttttgaaaaatggataaatatgattttttaaagcaactttcgtatagaatttttttgcaaaacacgcaccgtttagtagtttgaaaagcgtgctcggaaaacgagaggggtgagttgggaaaggagggggaagaacacagcctgagatatgagaaacgctatattgaacacaaagattagtgaaacaacaaaagataattaccactatatggaaaagactgagtaataaccttgcatgaacatggtagtatatccagttcctttccacaaagggataacaaaatgacggctacaaacaaaatgaaatgaaattggtgagacaaacagaaaaatcataacactacaacataattcaaatcaacaaagaaataccatgtagctgatctttgctccataagatggtaaagctttgcactcatagatgcacctatatgacctctccccaagtggtactattgttccaagaaacaaaatttcagccaagtaaattggaaaaaaaaatgaaatggaacaaaaaagatacgagttaacaatacataatgcagctgataggatgtgaaaaatagaaaaatcacactttacgattcccttatggaatgaaatgctttagtactggagtctggactattctggtgtactgatgtcatatatatcatttatgcatacaataaaagctagtcatggataattgtgtaattaattctaaccacctggtggtgaaaagagttatcacaccctaaaagaagaggcagttgtagaaatacaggaatactgggtagtttagactacctggattctcttcgatttaccctcgtaccctcatgatccatagtacgcaagatgaattcaacactacttaaaatggccatcttaccacatttccactacagtgcatgtatcagtggtggagctactaagatgcatagtttgcagctataccgctacagctgtagtttcaatgttgttggcacaatgcaaactatatatccctatttatatgttagtgtatagatatatagtgctccatcatttgaactagtttgtccatttgctagtttttcacttatttaaaatgaattgtgacatctaagtatgcaccccaattatcaatatcattgctctgccgccactggcatatattgtgatattcggccaatatttgttcagaaaatgaaactacgtgcagaaattattgtccgctatgttctttccttagaaggaattcctagcatccctattaacaaagatgctagaaagttattttcaacgaatcccgggtgaccaaagtgagcacattccagtttgttgatttcttgcttttagatactaaacttgcagttgttttggctaattctggaaacataaccgagaaatgaaaccaggacgatcttctagtgcagacattggaggggatcccgtcaatggcacatcgaaaacggaacagagcaaaacgaaaggaaatgaggaggcactgacgtcatcccaggcggcgacgaggtggtcgggggagagtccgctggcgcgctcgacgtcgaggatggaggcgagcggcttgggctgcagtggggtgaacccggtcgcgaaccgcgagtaacccctccgcggcggcgcccacccccacccccaccgggagaggagtgcaggcggcgccgcggggttcggcgaggggggaggggagggagcggggcggcgtcggggtgaggaggcggcggagcgcaggagccgtaggggtagccgccgcatcgccggagaaacgggtgggttgaagccggtgaggaggaagaagggtttgggaatttttggagttgatgggttaggtgggactttgggccgtgccgggctggcactccacggcacggcccatcgtgctcgactcgacatgccatcctcaatggcttggctcggtgaagcgaaagtaaggcctggtttccccaatctttttcttaaaaacatcacatcgaatctttgacatatgtatagaacattaaatatagattaaaaaattattatacagttagaggggaaatcgcgagatgaatctttgagcctaattagtccatgattagtcataagtgctacagtaacccacatgtactaatgacggattaattaggctcaaaagattcgtctcgcggtttccaggcgagttatgaaattagttttttttattagtgtccgaaaaccccttccgacatccgatcaaacatccaatgtgacacctaaaaatattttcttgtaaatatttgtaacttttttacccttgttctttattatatattaatatatcacagtaggagcctctcctgctgtttcccgtcaaaaaaaatgtgacacctaaaaattttcttttcgcgaactaaacaggccttaaacagaagagtgggaaattcacacaaggtgggaaacctgaaaggtgaaactttgggagtggaaaaatgaaatcaaggagggaaacctgaataaattcctgaaacactggagggaaaacgaaatggacgatcttcgtatggtttcaggcttttagattcagtcggttttttgctctgctgactctgtgggatttaatttgtctcgtcaaattatataggcaggaaatttaactctgcactgcgattttaattgaaacatccactacgaatttttaagacaaaacttaaggagaaacaatttattaataatagggatacaaagttgttgtctcgttaaaaaccatgcacccttcagtaggactctcggcaaggaaataagagtacaacaattagcttatattgttacattattcgttttgattggtatcatcattgttgatgtcaaattctaccaacgcattggtcattgcatcggcaatctctggatactatagacagtgttgtgtccattgatctacctccatctagtctttacgataaaagattgcatcatttatctcgagtgcaagacatgatctctgttcttcaataattcttctaaccttcctaaatgtttgctttgaagagacagatgacaccggaaccaatagaatatcccgtacaaagtgagctaccatataaagagtctgttcttttggcactacaatgaaatgcaaatcgtatgcataatagtacaaccacaggagaaagaagttgttccttcacatatgcatggctcgtgtgtgtttgtgtgtgtggattgaagcttagtacactacctcaacgttgacaacttgacatgcccataaatacaagttttgctttgactgttattatgacgtgaaccattgattcctggaaaaaaaagaacacgttataggccttgtttggttaattccaatgagaaagggattatagatttataggggtttaatttcacacctccaattcccttcagcccccttgagagaggaattaactgagcaagcacattttgggaatttttaaccaatcaggaaattccaagcagttgatatcctcattcagatatcaggaagtgttaagtgaaatggatattcaacacagatgctccaattatgtacattaactccagatagatagtagtaggataaactaatatgaacagaggtaagcataattatgcatacgatagatgagatggcaaaggatgctactatcttaaagaccaaaacaagttgccagagcaaatcatcaaacgaatgtgcacttccaaagcctgctccctatctttgtttgttctttagaactctagccattgacgcagcagtgaagagagcttctttctcaaacggcgagagctgcatatccctgcgatgccaataaaaattaaaagccataagaaatagccatgaaggaaacaacagtttcttttctgattattgctaataatatgcaacactggctgctaaacaacgaccagtttgcttttttagataatggaagctttatttagacttagttaattacatcaagacgaccagtctactgacagctttagaaacctggtggccactgtggtagtgaaataaaatactcacgggttgatttttctcatattatgaaaagcagatacaaaactctcagatatctgtaggagagtcgctccaatcttctttgttgtatcactatctttgctagaatcacattccagatgaaggcagacctggaaatatacaatgattaaccgaagtggtagattgtactgactggaaatgtatcaaaataacatgaggaacaggaaaatttaatacaaagatctcaaatgttttcatgcttcaagttgattaatgatgacattctcggattatggtcttgagttaaaaaaaaaaaaggagagggaacatgctatagacagtcatgctacattctctggaatgcatatagcaaggttcagctgcatgtaagcaattaggatgaagtgatccatggcacatacacagatgtcattgtatctacactgctaagagatgaaccgtgaggtggtaagccatataaattaggaaattatttatgcacaactaaacaccactacagcgcacacaagctagtctatagtggaacgcagatgcttagggctggtttgcggttactgcaatgtgctggctgcacaatggtttgaatctagatagttagaggaacttaactaaatagtagcccggtgaaaaaaacaaaatatagtataattcttctattacaactcaaaaggatagcttcaactaccagttacaaccataattagaaatagatgttttttgaagagccactactatccaagtattgcccaatgcaacagacttatattttgtcactctagactgttatcaatttatcatgcttggaagaaagaaaaaaaaactcaatgacctatgctgtcacagaacaaaaataaataaatttatgcatcattgcgatagtctgcatagcaaattttttaagttcctaacctggtatgcgtttgctaagagcagctggacaacttctgaactcatctttttaacaatggcttttgtggttgcagccgttgaaaataaagtcagtacattttccaatgtcaaatcgtgttgtgaattatcagatctccgagtacgaactgcaggctacaaagaaaaaggaagacaacaattattacatctaagactatacttccactacgaaagacaaaatgtacagttaatgtacgtgataatgatcaagaaatttacatattgctgcatgaaaatatcaagaatgcaagtagctccctctactccataacaaaatatgttgtgcctcaatgcaatccaaaaaaaaaaagatatgccattatttctgagatatgtttcctcctgttccttgaaaaatatttaatgtggctattcaatgggaaatgttacctaaaaaatcaaatgttgcttactacaaataatttaatatatctaaaaattctaacatgggttacgagaactaacttctaatcttctatagacatttctagaacaatcattaaccaatcctacatataaaaagtaagtaattcggagtgattagaatatttatttaagaggtgccaggctgacagctgatattagcaagtccgcaaatgttagcatcagcacaagaacctttttttttttggaattagaatacatttccatttgaccgaattcaaggcaattcagtctgttagattcatctagtagaaaagattagaagatgttctagttttaaaaaccagtttgaaattacaggtacaatctcatgtcctccgttatggatataggaaacaaattcagattatcccagtctagacatgatagcagcggaacattctaaggtggagaaactatctaagagacaagtcaaattggatcagctggaaagtgacagtattggtagtttggtaccaagattacttgagacagaaatgaccctgattggcacccttggctgccgcagccaagggtcaagctaatgcatgcaagcactctagcagctggctgtggcgcagctgcagccaggacattcgatcaagctgaatgagtaaaataagtcatatactgaaactctgaaaggtgtctcttggggtaatcttaagttgcacttttgatgcttggatgtcaggtactcaggtcaataaagaaacttaaatttaccataccttgccacaatattttgaaaagtactgaagtataatctccaatttccacttccattccacaaagatctgatataatttaagaataaataattaatttactaagaaaggacaagctgaaaagaagaattatacaactggagtactgagaggccctgatcggcacccttggctgcatcaccgcagccatgcatcaggctagtgcagtcaagcactgaagctgctggttgtggtgcagctgcagccaagacatccgatcaagccaaaaatggtgggcgcgaacaaaaataaagttaataactttaatctcattttccaaaaaaaatttctctggcactcacaacagtacagagtttcaggtacaaattttatgcaccagactcagctcaagtctctgtcgttattaaacaccatggttgacaatgtgcctgaactgttattaagaatgcaagattaccagctacttatggttaaaagaatcgaatgttgtactagagaaaataggagctggccaatcaagaaatgtgcctgctcattgacaaccattttagtggccaaataaaatacccttactcttacatcatatgcctttacaaaaatgacttatgacgtgcatttgagcaaggccagaaatggtccgctactcaagtaggagtaggttttttacattttactccaatgtgacatattttcagcctattccatatcaagtgttcaccactcacatttctccttttgccctccctctccctctctgtatttcccttttttttactccgagtcgtcaggagctacaaatatctcaggggccttcacagccctataacgagtgcatcacacaaacaattaaggagttccagggaaaataacaacagcacagctgccttagtaacagcacaaagaaattaattagacagtaagcttctaaagtttcatcaaggcttccaatatatgagctctctgttctttttatttattgagtatagattattccccactgcaattattaagacacttgagaatgtgtaacatgtggttgtggttcctaggccacatacctgagagacatggagtggcaaatcctcaagtttagtagtgtacctctatacagtagcaaattgtcataacccatccccctttatgaacaattagcacgtggcgagctacatatactgaagtggaaatttacaggtagcatgtaggaactgtgaataggtttttatcaagttattgatgcatgaccaactgatgcaagctgagaattactcaattacaataacaaagaattgtagatatttagggtaagacagggacaaatagatggaatgatttgcagttaccagaagaaatggagataaatagcttatgttgtaagttagctcatctaaaataacgtccaagataggattcctacaaagagagaaatggaatgtcagatatcaaaggaaccctagctaagcaaattgaagtcagaaatcagaaacataacctgcacccatcagctcttgaagtcagacccattgtgtctgcttcttttctaatcaagtcaaggttcataacctaaaaagaaaaacttgaaatcgttagcatctgtacttcatgcaagctatgtgtacaactaaatactcaccatagtgaaaagtttctgaactgatgcaagagcttttctttcgaattcaaaagatatgatagctaaggaagattctagatcaggtgctgatttagcagaaccttctttggaagatatgccatcttcaactccctgattatattgattgagcagaaaagatatgcagttctttactaaagatttgaatgccaccttccgtgaaacctgatgtaatggataacagaatgaattccagcaataccatagagcaacgtaagaaacttgcatgagttccacaccacttcaataaaaaaaaatgttgacatggagaagcagcacaagaactggccaataaatctaactaagatattctttatggactctggatgtagatcataccagaagcatctgtagaagagattccctgaaaattacccagtctaatgactctgttacaaaaccagaagaattggtaagaatatctttttctataaacacacatacaaaaaacagaagccaagttcatgactcatgagtataacttacctttatatgcaatctgacgaggtacaaaatcagcctcaagggtgctgacaagatattcaagcagcaccatgttctttatatgctaatttacaacaatagagaaaagtcaaactatgaagtcttaagcagcagcaaaataaatataactatgtgtgaaaaatacagccatagaatgcagtaatgaaaatatagaataaaagaaaccaatgtgcaatatttgagaaataacagctcaataggcaatatatgagattactttcattagcataacagtagaaattaaaaatatatatcctgtaggtcaaaaaggattaaactcaacatgagtttaagcaccttcattaaactattagaaagttgaccatattgaggtatagaactctaatttaagcttgatctttaatgactatggtatggtcccatcgtgtagtcatctttttaatagtcaattagaacagatatttatgctgagttataatatgatgacatatgctcctggatttccaattgaaatactcccatcactcaaagaaccaaggcctattgtcaattacctcaattccattattagcatctgtgtcattagctgtttcaaccatatcctcgattaatgatgaaaatctcttcaaaagggaaaaccagaattagatatctcacatgcagaaaaatcaggattcagaaggccaaatacgttgatatgtaggatcaataagtttggatatacttaaatatagtaacttaaaataaaaataggctcaaaaggcaactgtaattcccagttcttgacaatatacagtaccatgtaccaacataataaggaaaacatccataatccattagagaactcaagcagttgagtggctaggtagaaatcagtgcttagaactagatgacctagaggcttagagccttaaacccaagcagcacaacagcaaggggagggtacaactgtacaaaagcaaagtttgtttgcttcctgagcaggtttggctcttcgaccaagattgcataaaggtaggagaaaaagatttatgacttgtgtttttatcatgcctaccaaagatattgccatgtcctgagcactctgtaacaccagtggctaccaccctacagaggttgatagctacctgctcgtcaaggagggacaagtcgtcgtattcatcatggcattctgccagatgcagtcagcaaattaggcaggcctccaaccagccagcatggctccagcctctagtgatccagcaggagctttagcagatgagggccacaaccatatgtggcacacagctgctgaaccattacctctaagttaacttggttacaaggatgcatgacaataataacatatgattatactttttggccaaaacatgggtgggaagtttcatcagcagaaaaaaaatagagagaaattagaacttgatgagtaaatggcatataacatcaacttactgaagaatcgaagaggtggtctaagtgcctgttgtttcccccaatctcaccacaaccaacatcgctgcgaaggtgaaatggtgaccatgcctgcagagaacaagaaaatacttaatggtaacatgtatgacatgaaaattcaatggaagcatatatacacatggtactatgtgcttcaaaagaaaatgattgttgaaactataccatccttttacctctttaactgccactaaagcttggccagaaccagaatcggtcaaatatgctctagggtattgctgcaagataacgtaaaagataaatgaagtgagatgagatggcaattaaaaaacaatagtttctggtgatagtttatcatagtacacaatgattgaagcagagctgccctaaacaccaaggaaaattctttagtagtaagacttcaagaagtattgcagtattaaatggttttcacccctcaagaagatattaaatagtgaatcattgtacataaacgcccctttaatataaaatataccataggggattcccctactgtttcaaagtcaaaagaaaaatcatgagcatatgtccacattgtcagaactcaaacatattttttccatttttcatgtacttatcactgttgaactcactgcataaattttgacgattgtttttccagcaacgaattgtaatttgtaaacatttagaagtacacaatactgctagctaacattggttaacaaattaatgataagactctcattcattttaatcaaacaatttaaaatatattagtggtcaaaacttaaatagtaaattcaatagtgacaaataaataatacatagatagtaaatgatatatacaaccaaagggacaagagtcctcactgcttgcataaaaatgccagaaatattgtgaaagggattagaaacatttcaccttccccaactccattaagaggtggagacttgccatggtaagctccagcgagctgctgtcttgaagaatctggaaaacggcattatacattctccttgcaaaaggaaggaggattcacatgaaaaggttttcatatcatcatgaggggttgtggattgatcaaacaacgagcaaaatgagcatatttctcacaggagaaaactagttaatcagaaaaattacagaagaagaaaatattaagtattcctagtgcaaggaatgttataaaagaaaccgtaacaaatacatgcgtgaattcagtattagtgtaaaacaagtgcatatctatgcaaactccattttaattaaaagaagtgcagaagatggtatgagtatatatatcaagagctttggactaaatttataaaacagataagcaaaaaaaacatctgaaggctgtgaacagatagccccgaacatgtacggaaaaactttcagcaagcgaaacaatttctggagaaggaatcacgagtatcaatatgcacaaaaaaaacacacacacacacaaaagatgtgtccttattaaagtaagattgctaccagcatgttccagaaaaatttcaccccaagggcataggtttattaaacagaagggggtagcctactacacgagggattatgtccgtaccacgaagggggagaggggctgtcggcggcaaggcaggcggagcgcacggtctccaggaaggcgcaacctgtgggggagcgcgcaaaagatctattagcgccgggaatcaccaggttgggcgcaagagagagagaaacctaggaaaattccggagagattggaaacgggggaaagggagagggaggggactgggaggcgggggtacggtcgtcgtggaggtcgcgggcgtccttgatgccggcggtgtcgaggatggccatcgcgttctcctcgatgctgccatccgcggcggcggcggcggcgggtggcggcgcgcggcgggtcgccattttcttcggggggttttgagcggggtttcgggggttaacggcgggcgaggcgggaacaagaaaggatggctgctgcgcctgtggggtgtttttaagttgggttaattagacacatgccattactaatttgaaggtttggaaaaatgtcattactatttgacaaattgtaaagataccattataaatcgcacgatactggaaacatgccacgttctacgcctgatccgcgattgtactcgtttttatgcgtaccatatttacgtatggaccataatgcctttgtgtatgagtatgtagggaccgagtggaatcagtttgaccaagtgcattcacagtgaaccgtaaacgtaacactaggcttctccggcggcggcgggatttggaggcggcgtcggcggcgtcggcggcggcatcaggctttggcggcgttggcggcggtggcggcagcgtcggcggcagcggcgggctttggcggcaatggcggggagaggcagcccgattcgttcgacatcgagcggttgcagctttcagcgcacacgggccgcagcgtcgtcggcaccatggttgagatgtgcttgcggcaaagccgctgcagtgaacaaatccaacaccccgaggaatccagggcggcggtggattcagtgcgggaaagaggtaaaccccattgtttttcattttcttttgttgaaattcctttcttttttgtttcgttttcttgattgatgccattgatttgagatgtattgtgcagccaaagtgttgctcgttgtggatatgggaggatctgttgaacgaatatgtggaggaaatggttgcttattcccatgctggcgaggacgatggtctaagagacatgttgcgacagcttgcagaagagcataaggaagagaggtcgaggatgcagggtttggttgaggcaaaccataggcagatgcaatccatatatcagcagctgaatgattctaagaaaaagtgtgagcaactaaagaagatgttgaaagaagagaagtgtagtcgtagtagacaactttatgtgatgttgttcttgttggccataattatgtatttctatgtatgttctgtaaattttgtggccatatttagtgcaagtaggtaaatcagtgccattttgtgtaatgttaatcactgtctatgaattatgtggattcaatttctgagtaatgacataggtgtgttaattatgtggatttaatttcccactctggttgctctgttaaggataagtctggcagctcaaggtacaagctgatattgtgtgtttacagcaagagctaactgctgactcctgcactaaagctatgctaatatatgttcacttggtgtaaaaaaaaaaggaaggtataggacatcgaaatatcttttggtgtgaagtatataaagaactgaaagttctgtgtttttatttcctctttgaaaagactgcccatcattaagacaaatgaaaaagaagtacaggaaaatgagttcacaggaaatttgtgcattcagatggtattagttgagatgatcagcaacaaatatttcggcaacaaatatttcacatggtataagttgagatgatcagcaacaaatatttcacatggcatgtgttcagatgatcaacaatatttcacaatatggactgcatgttcacaggtttggactaatttcagcacactgcatgttcacatgttgcacacagtgcatatcacagtgccaggcaacataggcctcaaaatacaggttcaagacagtggcaggtaacatgaaggcctcaaaatacaatatagagtgcatatcactacagcaagtcaggaaggcctcaaaatacaatatatagtgcatatcacagtggcatgtcagcaaggcctcaaaacacacaagcttcaggattgtagatattgtgacaggcttctaacaactttagctgggccttctgaggcagctcgagcatccttcttcttctggggtgtcttctttttcttgggcgttttctttttcttgggtgtcttcttcttcttagcaggccttgatgaactttcatcttgagttttcttcctgcaaacagtgatatggatatgttagcaaatgcaacatatgtaaaagaattcaaaataaatagtcaaccatgcagcatattacctcttcttgggggaagcagtaggcacttcatcagtgtcttctggtgcttcagcctctttgcaagtcttggcaaagtgcccaaaaccatggcatctcctgcatcgcacccttcttgcccctggttcaagtgcacccctgatcctagtgactctaggcctccctgcacccctcttgagtctaggtggacagactttgaagcctaaattcaccacaggccattgtgatctgtctggcatagttggcactctccctgcataagctgctctgaacatgccaacagaaaagtactctgaaacaaaatctttaatctcaactcctctgttggaacatatccatgccaaggcatggttgcaaggttttcctgaaacctgccactttctgcatgaacatgtttggttgatcaaatgcacagtgtgccttctggtattgttgtcactctcaaccaatgtgatctcagccatgtcatcatcactcctagcaatctttacaactttcaggttgattgttgctgcattgagctgtttaatcacactgggcaggattccatcagtcaacttcaagtttctcttttgctgccttagctcccttgtcagggtttttctttaaccaatccttcagtctatctgcaatccagtcttgagtggccatcttcccttccatgagcttggttgtgggacactcatgtgcaaatggtagcttctttatctgcacacacattttaaatagtgctataagtcacaactttcaagcaaaatggatacaaatgtgcaaattgacatacaaacctgaatagttttgccatcagacaaccttgatgcatgaatgcgccatttacacccctcatgcttgcagtgggcaatgaatcttgttggatctgtttgcaaattagagagttcaaatcctgtaacaaccgcaaagtgcctaatagcttttctgaatgttatcatgtcaggaaaaacagcttcctccttaatcactggcatctcagggttatgaagaacattaaactctgctaggtcatcatcagtgacctcaaccttaccatgaggttgagtagtcctagaaggtccaccaggttcagcattttcagcacatggttcagcattttcagcactaggttgaccagaggtttcagcatgatctgtaggtggaatggtgtgaataggttgaatataaattccctcatcatcaacacccacatactcctcctccatgtcaaacacattaggcaatgtttcatccgcttcttgagttgcaggttcacctgaaactgccactttagatgcagatgctccctgccctgtctgagtaagtggaagaacacacaatggcattgatgttggctctatgttattagcactagcatcgcagagtacactctcaacaactaagaccattaattcagcatgcatttctgacttgtacatttcaaacatgtcaaccagttgagattcatggacaattctaacgtcctcattactgcccttgtccaaaaaccacacggttgcagtctgctactcaccccatctaacctctgagcttaagcttagcatcaacaaatccaaagataagctaccatactcaacatcccatttcagcacacaacccttagtatacctccgtctaccatccgaatctatggtggtaaaaccataaacctttaactctatcgagaacaacagtgtactgacattggaatgaaatcaagtcaaccacacatggaatgcacagaaaaaaaaaacctacacatccagctcacagcacatcgaatcgaaggaatcgactaccttaccttgatttgggctccatcccttgcagtacgtttcctacccctccatggaaagaaagagtcgtcgccgctgacgccgtagacgccgtcgccgctgccgccaaatatgccgccactgccgccatagacgccgtcgctgccgccgccgaatatgccgccactgccgccgtagacgccgtcgctgccgcagccgaagacaccgccgcagccgtcgtagcccgcaccgtcgccaccaccgccgccaccgtagacgttgtcatcgccgcggccgccgtagacgacgtcgccgccgtcgtcgctgctcctgctagggttaggtctaagagaacgagaaaggggataaaatgtgtgctgctcctgctgacccgactccagtcggtatagccggtcaaacaggggcattttggtcattaagaacaaattttagtcacatgtggtcagcaatcgcggatcaggcgtagaacgtggcatgtttccagtatcgtgcgatttgtaatggcatctttacaatttgtcaaatagtaattgcatttttccaaaccttcaaattagtaatggcatgtgtctaattaacccttttaagtttctagctgtgtttagttacacgctaaaacatggaaagttagaaaaaattggaacgatgtgatggaaaagttagaagtttcaagaaaaaaagttgaaatctaaacagaccttaattgcctattcaagtattcaaccctccagcatgtggggcatcaccaatgtatatgataaaagcctggttttttctccaacaagagttggttaagcttctcgataaaagtggtacgtttttcaaattgctaaacggtgcgtttcgtgcgaaaactttctatatgaaagttgttctgaaatatcaaattaatctatttttcaagtttgtaataattaaagcccaattaatcacatgttattaccacctcgttttgcgtgaaacacttcatctttatcttcatcttcatcttcagaagattcaaacaccacctttcatataaataggacttataacaatctcgacaacatatatagatacaagatattattagaagaagagagaagtagagatagatactattatttattatatatatatatatataggtagttcataagcatataggtaacttttgtttttttatatggactagttgcacaatgataataactggctgaatagaatattactcgtatattacttatggactatttttgcaccacattatggatgtcccaacttgacctttcaggtgggttgtttggatgttgatattttttactggtttgtgattgtagtgcattggttatgttggatgaggttcaagagaaaaagttatagctaagaaaaaaataattattgaccaactttattgaatataggttgtattttatatgacgtgatagagtggaatgcgtcgaaatcaatagcagttatatgtatttcgtatttatttttgaagtttgttggtcgtgatggattcattgggtctatgcatcatcaatggccactgccgggggttccttggcccatgtgttggtagagtaacctgcacaagtttgccattagcgaaaatgataacactttttgtcgcgaaagctattagatgtgcacaaattatcgcaaagtccttggagaagctcaagccacaagggatgaaagaaaagcccaagaagacagtggaggtaatttcaattgtattatggttgttcaatcattatatttttttttattgttgctaatatgttgtcatatgtgatggtaccatacgccatctcagcctctatgtgactttgtggaattaatagatatagggcatgtttggtagagctccagattatatgattatgattctgcaattttgattcttcctgaaacaaatattgaagagaatctgaatcagtagctttagacgtttggctagaaatgttagatgtagattctaatgtaagaacttgaagataaagtgtttgtaacaagatatttcgatgccatgaaaccaattttcccaattaaaaacatgtgcatagtgcactactgtaattgtacagaaaaaattggctttcatgtttgctccaattaacattcatgttgccattacgtacacaattaatatttgccacactgactctgacaattcgcataattactattcagattttcaaattgccaaagttggccattcttccaattcattttataaacacaattccgcctaatgaaccgatcttcattaggagagacacggtgttggtctaaatttctgaaactagaatacctctggaactagaatactctgaaactgaaacatctctgaaacacctaaaaaatcgcagcttgaattccagtctggggcagcgcggtgactacgaaggcgtcaaagggggccatgactgcaaatgcgccaccagatacaaagccattagttcttgcaccaaatgcagaacaaaatcatttttatcttgagcttgtcataatcataggcatttcacatcactaaaatatatttatggagccacaaatctttagatctacacaagtcaactaacacacaatgcatttgtatttatcagcactacaatcttgtcacatatacacaaatccacgggataaaatccactatatatcagaaaaggaatggaaatgaggaaattattgcaacaaaggaaaggggattagtacctttgttgttcatgcctagggagctcgaagagatggggaagcggtggcggggctagaaggagaccagtggcatcgttgcctggtgtcggaggtgtcctggataccaagcgaacagcggtggcgacggcatgtctctgcagggccgagggaggagatggagacaggtggtgtcgcctaggagggcgtggtgggtgtggccaggagacgccaccagcgagggcagagctaggtgtagcacatcgtctcctagctcttgcaaccctaccgatgggtgcgagctcaagcattctgttttgatagcactgcagagggggtatacccaatggcaggtgagtaatttttgagaaaatttatggagaagttcatatttggttggcttgattctcatgagaagctagctagctttccaccgattcacccttgcttcataaaaaggggaatcgatcccaattgattcgccctggaagctaagaaaaaaattgcccgtttggcttagcttcaactaattctaccgagaatccctaccaaacacacccatagatgtccgtcaaaaagacatggaggatttgtgtaggcagaagctatcattcaggtagtattcaagtagaagataaaggaggatcaagaatgtaaggagaaggaagagcgcatggctgaatatgggatgatgcgtgagagggcatgtcgtgcaaaggaagctcagtcggaggctacgaggaaaggccatggaagtacccccaatgcccttagtaagatgattatttttatttttatggaccaatttattataaattccctaagcgatgtaatgatgttatttggagacgtctcatgttgatatatccatgcacatgccattatttgttgacgatgcatgcttggataaataaattgtggagcatatgtattgtgcttgtaatgtgtttaaagttgccaaaatgtgtttcgtgagaaatatctcctattaggcaatatgtgtattatgaattgtggcaaatgtctacaccgtgacaaattaatgaatgtttatattttaaataatagcttattaaccaagctcgaatgagtcatgtggcaacttcattgtgaagcatctagaccccgctgttaattttggtaattaaatgacaagcactaattgtggactaaccgttctctttgagttatatattttgtgttaggaccacgtgatatgtgtgcatagataattatcgaaggattaaaatttgatggcgcaaagcaaaggaaagaagatgataaactagtgttttaattttaaattgatcgaggagttgggcgatcaaattgtgctagttttgtttatagctctgccgtactattaagaggggtaatgacctagcaaagagatgatcaaaatgctacattcggtcatttgcatttagactcgtctcaatatttgcttgtgtctgcactgggtgaccaaggccggtctgaccgggcccctagtggcggtctcaccggcgtaggtcggccggtctggccggcaagtgaaccccggtctgactggcccaggggatttcggtcgtgtactggttgggtgctccatgggtggaaaacccgagccgccggagccgtaaccggttagaccgagccggtggcggtctgaccgagccgaggctggtctgactagcccctagtggtaggttcaattattgccctgtaacgactagttttctagccgttacaaagtagcatgatctgaccggccacataacggcagtctgaccggcaatacattgagttgggggatttcgcccccaatggctagttttggttggtgggagtataagtactcccccactagcagcaaggggtctctcttggcactcacttcaattgcatacaacccttgcatctctcccacattcactcgagcttgtgttcatccattgttatggttgagagttgttctagccaagggtcaagtgcattgcttccattgtagagctagtgtggcacttaatcatctccgagccgggtcatcgcttattactcttggaggttaccgcctcctagacagcttgtggaggtgttgctcggtaacctctccgaggagattacggaggaggtccggcgccggtttgtgagtggtttggagttcaccaccttcggagtgaaggaagaactacccctagtgatcgaggcttgggtagtcctttccgtgtgccggctcccgccttgcccacccttgacaaagtggcatgcggtggcttcatggttgagtggtggagttgggctcgcctcaacggggattaggaaacagcgagtttccgaaccgcggtgaaaaattccttgtctcttgtctcatttacttgttacatttagatttgtgcaatttacattcgtagatacatatttgagcccatatcaccctaggattgcaaaatataacttagttgcttagttagacttgtccctcgccgagcctagcaacttaggttagttttgattaggtgttatttagttttaaatcgcctattcaccctccctctagttgacatcttgatcctacacattgcagcgacggagggagatgggtacacggggaacatctatacgcacaaaatattttgcacgactccaaatataaaaggcaaattttgctaagaaatcaatctttgggaaggacactctcaagaaatggttatttgctattggacattatgtccattaaaatatccatttccgactaactaagagagaaacaatatgcaaggttaaatatgccccttgctctacttgtcatattcttccttttccttcctcttgatcctttctttccttggcctctagctaggccaatgatcgtgccaacatctaggaagccaacacccaagcaatttgctgaccttgaccgcagcttaggatgctcaccagggagtccaacaagaacccctcgtcatgggcatgcctgagaccaagccacgctatgcaagggtcttggcgatgctcaccatggtagatatttggaggccaaggccattttcatcatcacaaaattcagaaaagccaccgtacaatcagactggatgagtgtcaaagcatgcaaggaatgtcaaaagccagaaacattataggcatcaagatgtttcactctgtcagaagtactcagttggcagaggtgatcctatcaggacatataccagactgaacgaatttaaagtcaatcgaaattgttggtgacatagggcaagaatcagtcgtaccatctgatgcactccgatatgaatccttttgccaaacaccatcttgattctaccgtgctttgcgctgagggagacgaatttggtggtagcaggatgggtcaaccaatgtgtggactggagacctcagtggtggcgtaccggacaacagcgggacctgggccaacggtggacgtgcgtggcatagtagacggcggcgatggctaaggggagcaaggaggagaccgaggtgcaccgtgcgcagaggtggaggagcgaccgagtcgccatgaagcggacggcagcgatgcgtaggcttgagaggcggcacgtgcagacgcccttgaagacggaggatcgacgacagcgtcagcagctgtcggcatgggagagatgagggcgtggcatcgcatagggtttggcgattcgtcgatggcgacgacgaggtgaggggagcgaagaggagcgaggagggagcaagtagcgcgcgggtacagagtcatcgtgcagtggcgtgagggcgggcggaaagcgtggtggagaggatagggtcaccgagtgaaattggtggaagagagatttctcctagcgaatcgaataacggatgagattatttgacccagtggtggatggtgagataacacgtgatgatttgacgtgtaggattggaggggtgaactcctcctttttatattactagtaatcgtgcacgtgcaaggcacatcggtatcatattcagttagaagtccactattccttaagcaaccacaaagagtaattcatatgataaaaatgaaaaaccatggtgatgattttcagtgcgtgagaagtcatcatcgtcaagtttgacaataaagtattgtttatccaaatcctcaaaacgctgcacatgcatgacggatttcagaggaatagagacaattaggcaaaagttaggagactgaaagcaagcctgtccatttggttagtgctcataacttaatgcaatctttcaatgcatacaattaggcacacaccaaaatatacagattacagggattactattacccaaaaccagttttccaaggtgatggaatttaattgaagcataatggttccatacagaggttttcactggggactccagcttgacaacaggtgatgaaatttcatagtctagcatctaactaaacaaaatataaactatgaataaatttattattgagcagtggcattataacatatctgcccccttccctaaaaaagggaaaatatgacacgaagggcctataacagtgcatgcttacttctagtgattacacaaaagaattaaaccgcaagcaccaccattatttgccattgacactatttatatttgataaatagtaaacattctatagcataaaccaaaatccatactatgatagtggtgcacaatattatttattctaaaaggcgcaatgggactgcaaaatgattgagttgtgcacattttctcctataactattatgcctaaggggtagagggtatatcgataacttcaactcctggtggaaatgctactgggtgagcgatcgccctcgctcgcgcagagcgatcgattcccccccctcctccccctccctccctccacctggttttcttttttggcaccgtattactttcctattttagtaaatttatgcacctaaagtttatacacctcaagtttacacatctaaagtttagagatcaaaagtttataagtcaaaagtttatatatccgattcaaatttaaatttgaattcaaatattttttatatatagtatttctatacatttaaagtttatacacctaaagtttaaagtttatagacctaaagtttatatatccgattcaaatttgaatttgaattcaaatatttttcatatatagtatttctatacatctaaagtttatacacctaaagtttatagacctaaagttcatatacccgattcaaatttgaatttgaattatatccaattcaaatttgaatttgaattcaaataattcaaatattttctatatatagtatttctatacatctaaagtttatagatcaaaagtttataagtcaaaagtttacatacccgattcaaatttgaatttgaattcaaattttttatacataaatttttctaactttttatttttttaaaatttttttgtggtgtactgtaataggaagagaagaaggggaggaggaaggggagaagtgggaggagtgcggagcgggggagggggaccgatcgcattagcccccccccctccccaactcctcagggatagtgaatcccttattgccagtgcgcttcttttttggcactggttcaatcaccacttcatcatcttcaactatcaccacttctggctctgctagatcgttgttttgttcttccaattgcagtagctcttgcttcctataggtcacagcaatcttaatggcgtcatgtagggttggttctttcaacaaggagtttctcacctctgcatccattttaacaaagattgcacatacattttgttaatggttcttcaaaagtaatagcaaaatattgagatgttgtaccttccaacaaagcataccgctggtagtcacgattgtgcaaaaacattattgtagttgcagctatggtggataggcaatctgaaacataaatgtctttcgtgtttgataatgacagcaagtaaaagacagtgaattgatcgaaacatgaaaatacgacttacttgaagctttatcaacctccaatgccgtggcaacaactatgccatgtcgagtttcacttgtgataagctgggaccgataaaagtctgcgacttcatcaaaagcacacaagaaagcaacttgatagctacaacaacagagagaaaagttacctaatcaaaagcacatttgtataatatatatttaagaaaagtaaaaataggggggaaacagtgtgtgcaaggatatattcatacttgagaaacatggcaaggctgtgtccacacgcagaatttagatacattccatgttcatgttcacaaaataatctggattttataaatacctagaaatccaaatcaattgttaagtatgaacttgtataatatgaatttagtatgaatttgtagagaataaatcgtaaccttaaaaggtaacatgagtatattgtttacacacactgcaagggtcaaggtcagacactaaactcagacaaaccttacatctattggtgaatttgtaaactttcagtacttaagctataagaactcataactttaattagctcacagaaaatcaaaacattgagcaacatgtagatatggtcatgtagttgtcagcagaaatatagaactgagagatcaagcgatctgtaagtacaaacatgtgaatgtcaaatattattctgataggcaaatatgcttaagtaatggtgtcctccaaacttacaatcgtgattaacttgctccacttaagtcatgtccatcaccttgcctaatgccatcctccaaacctgcaatcctgataaaattgctccactgaagtcatatgcatcacgttgtgcctaattccatcctctaaacctgtggtcaaaggtgccactaggttgcctcctcttgcaaagaagaaaataaaaagaatgcctattagcagcttgtgagcaatggctaggataatcccagatcaatgccgatataaaaatgaaaattatgtatgttgtagtagtgcttgatataaaaataaaattatgtatgttgtagtagttctagacttctagagcatcatggaatgtgttttggtcgcgccgcgtgcccctggggcagaggctggggatatagcacatcttctgcttcaaaataaaatatcttctttatctaaaataaggtttatctctttggagaatatatttcaccaaaaagcaccaaaattctatcaattcaccaactactgctagttggaagcatttaagccatgctaatgaaaaggtacacactcaaattcgtaaaaaaaaagagtagtagtaattcctattcagaatcaactggttcatgcttgtacctctgcatacactaagctgagtttatctaataggttcatacaaaatatatccatttatccttgtctaatcatagtaaaatagtaaaaaacctaaagtaaagaaataatcctgcatatatggatattacctttttgttgtacctgtggagtacatgaaatcagatatatcaaccaaaggccaatcaatggcaaataaaagaacaaaatctccttgaccctcctcattgagcatcttaaagctaaaagccatcaaataaaggcctattgttcttccattatgcttactccatctccagcatatctgcatatgcttgtattaactgtagagacaattatggtagttttttttagcatggctagcagtatcaaatggtggattgcagtgccacattaaatcagaaattcagatctacctttttaggctacagaaataaaatataaatctttcatgttctcaggaataaccaataaaatcaaacttttcaactttaaccacatccttgggcgtagccataatttttgtgcaaattagctttctatgccaaaagtaaaaaaaaaagaatgtttcgttataaccaagggagatcgaaccaaaagagtcaaagaattagaacatctctaaatacccactatactgatcagctccacacatgctattctaaagcacaggtcccgccaactaccgtctgatgcagcatttgccacaccattgagtcaggcattttcttctcctagtcaaaagccactcctatttgcttgaccatcgctactcttaatgattcgattgaacaaattgccgcaggggatgagggatacctggggtcccagagaaacgaaggccgctgcccatcatgttctgagaatgtttttttaaactgctataatgccgatccgggaaaaagtttgaacacataacctgtcagatatgtgtaacttgttagttaattgtatcccaaaactttacaactctttctgaagcaataatgtttttctttagacaaaaaaagggaggtaacacatatgaactgctatattacatagactcaggttagatatataattactttgtgaactacttaatatatatgtaatttattcatggatgctcatctatgctcattcacaaaagtactaaacaaatgaatcagaagggagcatatgaattctcatatgtgtttcgactttggatacccttaatctgatcgaaccagtcagctccaaccggtctgatcgaaccaatcaggtccaactggtggagtggtgccccgagcaacaacctgtcctctatgctcgcacgaaagcagtggacgacacacaaccaagcatgttggttggctgattatgcagatggccagaactgctgaagccagcggccggcaacaaggttggtgccggagaaagcggacgtcggctccggtgctggtgccatcaagatgtagtcatgccaattcgaccaagagcctatcgcgaggcacgtcggaggtgtagcggaggtgccccagcaatcttgcggaaccgcgcatagcgaagggtccgtccgttggtcgtcaggcgacagcggtgcgaggagagttggagatagtggcctggtgacgatcaaggtgcagcgaatcaatgatacctgaagcgatctctccatcgcatggtggtgcaagggacggcgccgaatgtgtgatgtttaatcccggggaagaggagcatgaattgggggagtaatcaggaaatgatgatgggggcgacatttgcgagaattgaggaggagattgctccgttggtgattggatccgtggatgcatgagttcacctgttgcattgcaaactcatggtagatgatgtgatgtgatgcggatggacggtagggattagggatgatgatttcacctgtaggattggaagtggcaactcctttttatattagtatagatatagttatagataagcatcagcctagcacaagttgtgctgaaaagcaacaacttctgcaaaacgatgggggacgcgtctagtacgtgaacgttcgtggctcacgaacgttacaacagcttatccctctttacatccgaaccggcaggcttccccctaattatatgcctaattacgcgtctaatgatgattagcgtcgatctttggttaaaaaccaaatctacgcatactcagcatgactagcgtttattctgaggtttgttttgatgataagattatatttttcccaaaaatatctagagctgattagcatattttttatttccattgatatttataaaactaaatttgctaattgcatatataaattctatataaaatttataagcagaattcattttataatttattttcattaaaactttctacatatacattttataacacaaactttctacatataaactttttatatataaagtctatataaagaaactttacatatataaaggatatgcgtagaaattttaattatatatgtaaaatttatatgtagaaagttttcacgtgaataattcatataaaaatatctctattaataaaactaggaaatctaaaaagaaggtaaaagaaatcttgacgtacaatgaggatcacgtaaataaaggcaaactgaaaaattggaaagataagaatatatatgcttgatacgtaccaggaaaatcgtataaaaaagagaaattagaaaagaaagaacacataccactccatcccgcctcctctaatcctccctatctgagcgattcgctagattattagtcggcgaacgttcacctactatacatttcgaacgaagggagccctaaactatttagagttttttttaagaaaaataaaattatactccgtccatttcacaatgtaagtcattttagcatttctcacattcatatttatgcgaagattcattagcataaatatgaatgtgagaaatgctagaatgacatatatctagattcattagcataaatatgaatgtaagaaatgctagaatgacttacattgtgtctagatttattaacataaagaatggcttacattgtgaaacgaaggaagtagttgattttgctacctcatctcccatttactcgtttataaagattagtctcaaaagaaaaacaagtttatttttttattggaaaaaagaaaaacaagtaatccacacgccagaaggtacgtgaggcttcccgaatgataataacacactgagcaccgggacccacctgcctcttgagttcactggtttctcgtgttgcgttgcgtaggtgagccagccatcttttaccgcccgcttcccttcccttcccttcccaaaccctaacccccccaaatctcccacaccgctcccccgccgccatggccgcctccgacgccgacgccgcggaggtcgagcggctctacgagctcggcgagcgcctctcctccgccaaggacaagtcccaggtgcgcctccgctcccccctccgccgcctgctccattcgccgctacgggccccgccgccgccgcctagggttttgacggggtttcgttttgctcggggggcggccttccgcatcgcagcacgcggcggactacgaggcgatcatatcggccgtgaaggggcagagcgtgaaggcgaagcagctcgcggcgcagctcatcccccgcttcttccggagcttcccggcactcgccccgcgcgccatggaggccatgttcgacctcgtcgacatggaggaactcgcggtatgcactctcccttttcgagaatccagataatgctgctcgtgtacgacctagtttagctttacagaattacagaacgagtcacttgcattatttgctaatttaaccattcgtttaaaacaaaattcctgaattgctagagcttttatatgtttaaggtctggaattcaggtctttcctgtttaggtaacttgcttggtccactgagtttttggcaaaatcgtgccacattttctgccccttgcttaggcgcatcattttcttttgtttgccaacgaagcttttttccctaatatgtgcaaacaatatgcgttgactgggatttcatctatcatttatttcttcatgttgaacatcatcatttcatgaacaaactcagagaaagaagagacaaggtcactcttcccagccttcaattatttcttctctagctcttattatcttatccatgcgttgttgctactaagggcttgtttggtttgttgcacgaaccaaattttggcagtgttgggattatgtttggtttgaagccgtaccatatcttagtagagattttgagactgtgaacttctggaaataccaaatcttggtaacctgtaacaattgctaccctaccaataaaggtagttgggttgaaagtggctacaagccaaatagaccctacaatcgaaatgcacattgtggaaaaatattataatatttttttcttggagtattctatctaactgaaactgtacctttatttttgaaagaaactatttgatatgtggtaactaggaaatatgtatctggtgcattttgttttcggttctcatatagaaaattagactgttcctaccaattttgatgcccatttgctttctgatattcatatatgacttaatgtatttatgctgaacaaatgaactgagtaatgcagtcctttgtccgttaatggttttttctcatgcttgtccctggttacttgatacttaagagtcttttgtcacttaatggttgtttctcatgtgtaaaggcaagcaagagctcttcttcagaaataaactacatttgttagaatatcatcattacgtcttcagttttctttagatcaatatggatgcattatgtgtctcaggttccattaattctgcatgattaactcctccttaaatgttcttgcagactagaatacaagctattcgtggttttccacttcttgccaaagatgcagaatttgtctcaaaaattgccgatatccttggacaactccttgcaagtggtacaatcattttgctatttttaatttggatcaaatggtacacatttgcattcttctgagttctgcatgtattttagaggaaaatgtggagcgtgatgctgttcataaagcactgatgtcgcttatacggcaggatgttaaaagtaagctttcagtaaccatttgctcattgtttgtcaccttacaaatatttttctgaatatgtactctttttgaacattgaactactgacctagtttgccatgaattttccttttgggatgtacacctgttgagtattcaagtatatcttatcgttgctctaaaaagaatttgtagattgtgctcaaggcaacaacattagatgactttgttgattttctaccaccaatattttttttattccagattcatccctagtggcaatttattggaccttcatgtaaatttagaaaccaggagaaccagccaaccgatttatgtttatttagtcccagtttgtgtactatctgaacttttttcattcaatttatcacgacatatgtgttggacacaacacattattgttattttcttgttttagaaccagtgttttgaaacaagatagcttgtactatcaatatatgttcatgcgattagttacagacttacaaaactaggtctatcgctagttcagttatccacgaatgcattttgttaatatatattggccttagaatttggtacttgaaaaatagtagtgtttcttaggaatgacatatattccatgccatctaaatgtaatgtaaactgcatttatagaaatgcatttacagccatgccatctaaatttcaggattcttagtattttaagctatttatcaaaaaaaagtgatatcagtattttggattcattaattttgtacacatgattttggttttaaaatggatagttatcattgtcaatatacgttgaatgattattgatatatgctgaatgattatcgatatgcgctgaatgattatcaatatatgctaaatgattacaagaccaagagagtcaatctgtattgtgttggcatcccactattccatatccacatggtttctgagaaatttgaagatgaatgttcgatagcttggtgcacagacatttttgcttttggtgaactgtctgtaagactctttatctttctaaaagtagcatgtctattgagtttctgatgcctttaaaatcaataaccattctttttaccttgctcttggttgagacggggatagtatgacagagttagaatctgatttttcttgaaccggtgctttgttgatccctgctatggttttgttgacatgccctttccccatgattttgtcagagctcgtatgatattatatccttgcaggtgttgaatgactagttctatttaatagtaatggtctgacgtgtatgcaagttggcttcatgaaatacttctattggctgcttttattgatttgtaccttctttgggccaggttccttgcagcctttatttaagcatgtggagtcgggatcagagattcgtgaaaaagttatttgtttccttaaagataaggtaaatagttacacataggaattactcgagttgtaggcatgggcaatcactgttctaccagaaaataataactgatcttttttccaggtcttccctgttaaagcagagctgctgaaacctcaagcagaaatggaaagatatataactgatttgataaagaaagtatgccttcattatttcagtttttggctgtctgatttttttttcagtgatttaagtttccatgtacattgtgtgatgacctttgacaatggctgttataattcagagtgtgctagatgtaaccgggttggaatttaaattattcatggatttcctgcggagtctcagtatatttggggattccgctcctcgagagtcgttccaggaattgattgaaatcattcaagcacaagctgatcttgatgcacaattcaatgtaagtatgttctttgaatgttcctggagctaatttacatatacgcatcataatcaagcaagttagggcctcatcttttcgcttatgcttatgcttatcagccaaaatttgaattttcaaccttaaatctggagctgattttgagcttttttcattgaagtttatttttcagcctttgcttttagatcgctaagaacacgtatataaaggttttattcacaaattacctctcgtttgcaaatatgccgttttgcttatcccgcgaataagcgaaacaatggctccgttagttggataacatgtcacctgtcatccttaactgcgcattatgcccttcttttttcttaaatgattttagcagtgatgtttagtgggcattacccatactgttgtttatcttatgctctacatatgaccttcataaacagttctcgataaatgcaagaagaaatgtttttttctcatgaaattgggtatgtaggctcatactggactttgaactaatgtatctaggtagcctgtcatgttttctcacacccagcctttgtttacacattttggcttgtgagcttcacaagacaccccaggcatctctcttactcttttcaccgtgcacaattatcaatcttacttctgcttggtttttctataaatacttaccaatctatgctcaacagtccacatctccaccaatcatccgctagtgttcatagcagccttggctaatgttgaggcacatgggcaagtgaggctatgctcaaatacccatctttgaattccgcagttcctccaaacggcaccatcctctgcttccactcgacttctcttttctctctccatctctctttctctaggatggatggagcggcacgggcagagtgatgatggtaacccagtggctgcagcggccgtctgcagtaggttggacacaaggtgtcaggtggtgtttgtcgcctggtgtaatggtgttgggtctagttgcggatcgaccaatgtggcagatcgctcaaagaatctactgttctacttgctgtcttttcatcgctgcagggagtggcttgtgttgttggtttttgttaaaaacaaggctgatttagttataattgaaacagctagttcctataaccatgctaagaactgattttaggaaaaccagttcccaaaaatccctgatccaaataacccctaagagtatgtattgatgctggataattttgcaatctcctgcatcaaccaacctattcgatattctgttactattgtggccatgtccaaatataggtgttctcttacatatctcaatctgtcattaactggtcatcttgataacaaaaatgtcagttatgatatcaaattatgtatgtaaggtatttgttctcttcctttgaacctgattgtatgcttttctcaacatcctcaattaattctttttaggtttctgacattgaccacattgagaggtggacgtcgtgcatgtatatggctcttcctatctttatggtacgaacaatttgttttgtcaaacaatggattttttataaattgttacttcctccgtttcatattataagactttctagcattgcccacattaatatataagttaatgaatctagacatattgtgcctagattcattaacatatatatgaatgtgggcaatgctagaaggtcttataacctgaaacggaggtagtacttgttagtgaatgtcatcttatcttatgctttttttttcactacatttgcatgatctgcagagagggggatcgagcagcaagttcctcaactatttcgttaagcaaattgttccagtttttgacaaggtaatcttctttatcttgtacattggtccctgtgctttgttggaaaaaacagtaaatgcttctttttaattatattatgcatggcagctctacaacccttgttttgttgtcatacataatgtaacattttgcagtttgcacaccattttttttttgaaacatttggttacattccttacttgtgataaagaaacagctcttgcaatcatgcacatttctgcattctgcactaacattgcatggtaaaaaaaagtctgtcgtatttttttgtaactatggatattctaattgaattgccatcattttggcaatcagactccccaccatgccttgaacttgtttatcttcaaaacaaagtgaattcgcatcttagagcatgaaggttttctagagcatgaaggttttctagagcattaaggttttcccctcttttttacctgttttagattcctgaagagaagaaactggatttgctcaaaacagttgctgcaagctcaccatatgctacagcacaagatgcacggcagctgcttccccctgttgttcaattgctcaaggtctgtgcaattcctgtctgataggtgtccaatccccctttgttaatgttttattttgtcccctagaagacattgttagatggtttcccctccaccgcggtgttacacaataaatgtcgtgtcttaccattgcatttacgttttcttttacagaaatatatgcctgggaagaaggtggaagatatcaaccataattatgttgagtgcctgatgtacatttttcaccatttagcccataaggtttgatgacagaatgtttatcatctattatgaaccatgtcttttcttcatggatggccttgtgctgaccaaatgaaatacagacaccaaacaccacaaacagcctatgtggttacaagattgttactggacaaccatcggatagacttggagaggatttctcagaacattacaaagactttacggagaggtaggttgcattttccttatgatttctttgaactatttttatttgtgtgcattcctttaagaaccacagcttagacaatggttattttttaaattagttccaccaaatcattagttatcatacattggggcagttgcagtagtaccatgactaccacgtgcttaagtggacaaaaaaaatctagcactagggtgaaggaatccatcttgtctgagtatgatcctgaggtaaggggtaattgacatgtaaaaaatgagtgatgccatgacgctagtatctgggtcacatctattgttaaatcttagaataaaataataggttgtactagaagatttgaccaaaggtacattgtaaatggatgatctgtagtaattttatataaatatggacatatagataattgaagaataattggaatttggaagtgatttgcatgattgttaaggcatcgctgtagtgctagggtgtgccaaggggtcagggcgtaagggcttaacgccataacccagagagagagagagagagatgtgaggtttccactctcttcttccccctgtgccactatcaagattctacctaggattgaatcagatcaattattctatggttgttcgactagtagacttgtattaagattttaacaaacatgatgcttggcttggcggtttccgttgatgaggaaaatagacaatttgttataactctcttaattggccgtcattcgctatgtgtggcaacattatcttacacaaattttgttctcccatagcttgcgaaacatcttttacgccatattctggtgtggtaatctaatataaatcataaatcgtttttctataaattatgataaaattcctttcaattttttaatatggtgtgagagcgtatggtattttgttttggtgatctgttttatttgctagtttcttactgctgcacgtgcacaggttaactggaacagaagagacagttcgagcagtctcaaagagactaactcaggggatggcagattttaacaaggcaatatcttcagcaaagactgaagaagagaaaactaaaattgtgagtttttaggtgctttgcataaattttctatgttcctccttccgtgttggatcagcactattgttagctgacttatccttgtctcagaatcttgtaacatcatattctacaagattgtttccaagttctttgtttggcaattagattgatactatgactttaaaaacaattacaacaactgatcatcgtttggatatgatgttcttttggcagaaatctgatcagcagaaatcaacaatgacaatgagggcctacaacaacatactagcaatggcgcaggtgatttctttattactttagtggaactgtgtgatatgtgaattgcaaaatgctatcgcatgtgagaataatgtggtgacacatatgagggtatttttgaaatcacaagaagcttccaaatgctctctgcttgggcttctcatggtggaccagttacaattttaaatgtataacaaaagaactattgaaaatactagcaaatagcagtgggagtttttttttcgttacagatctgcttttgagcatagtaccgaaatctgaccactgttagtcaagaccaaaaaaaaaactgtgaccagggcccggtctggtttggattaatagaaacaatgatagtgagaaaaactgggatgtttaaactttctggtacattttaattccgcttggagtcgaatcccttttacctgaggttatattgcatgtgtaggatgtgctgataagcaactgtgttgagattggcatgtgatttatttaaggaagttttcaatatgagcctttattttaatacaggcttggggtttaattcaaaattaatactctgaactgtctggctcactgtcaaaccatgtttgaatcagcgaaccgaggactgatttgagtgaatagttcacatgctggtttgagttttgcactatgcttttgaggcctgtgaaggaactgcaggactatcttaagtaaaagttaagtggccttttataattgcatgtacacaaccgaattcaactttggctaccaatctctacgaattaccttagatatatgaaaatgacgagtaggttgtgtcaaaaaattccattgtagttgtattaatttgtacaatggaaaagttgcatgtgttaatgtctaaaacacatcttattctactgctggaggaagcataagtacacggcaatgtatgaaatatactgcttgtgtatactaataatactaacctacctaaatgtttatgctttctaactaaacgtgatgaatgttcatttcagccgttgcgtgcgaaatcccctttatttattggtgacaagaaaatcactctctcatggatggagcagccaaagaaaccagcacctacaacaacagggttagatttctattacctaatattccatttccccctcagactttgcatttcattatagttaagtctgctttgtggatcttttagagggaagaggtcccagcctgctacaaatgggaacacccctgcgagcaagaaggggcggggagagggagcagcccggaatcaacttgtgaacagagcttttgaagggttatcccgtggtggtagagggagtggaagaggccggggcaggggaggccggggaagaggatggggctaccgctgagaatagttggaaatccctgcaatctgatgggagaatagatcagctttctgctttgatttgaggtacttctcaggagataagcttttctgtatgcagcaaaatgggattggtgatagcccgtgaaggcatgctcaattgctgaatgcatacagaaagctcatatgatggatgcttgagtatatcgatgattttttagaccctagtcgtggaggttcaagaatgtggagtgtatgtacgccctagttcatttacatccctgaccgtttgttagttgaccagttctacttgttttggtggttcgatgaactcaagcagaacttttaaattctagaatttgttgttaaagactatttatttaagaatcaatagattgccgaggtgaattatgtttattgcaatattgtttgctttcgtcacgatttgtatcaaattttgttggtattatcgcagaggcgatgacgggaactctaggcaaagttgtggtaagcatcaattgaaccggtgaatgtgaatgtgaatggttaagaattttctcatggctgtatgttatgttgagagaacagcggatgagatgatgtcagaatggtcggtttattgatcctgaaagtgcactttcatggtaatattcctagaaaatgtagacaccatggccgtgctgctgctttctaatgcggaaaaatgtttgtccattttacggttttcaggtccatctgccatctcactttaatctcctttaacttgtattcgggcggtcactagcacagttaaattctgacaatttgacatctgtttcgctgcgctttgccaatttgacaatagctttcgtgaacttcgccaaaaatatctatcacctcgtttgaataagttaactttaggtccttaacttgatagggagttcgatttgtacttgaaccgcaatacgagatacaacgggtttctcaactatgaaaaccgatgcaactatcaaaactgatgcaatataggtccatggaggtttggacggtgaaactggtatctataatttggcttggtcttcatctgacatggcacgataagcaatttttaacaatttaaaaattaaaataaaatatgtaggttcatatgtcaatcaaataataagattttaaaaagtgggacccacatgttaatgggtcgcacttcctccacctcattctctctcttctctatctcttccccctttcccctcttcctccctagacgcgcaacgaatgttcaatttaaaaattaaaacaaaatttgtgggttcatatgtcaattaaataataagattaaaaaagtgggacccacatgttagtgggtcacacttcctccacctcattctctctcttctctatctcttcccctcttcctctcttcctccctagacgcgcagtgaatgttaagctcgagcgttgtcaccgtctccctctggtgcaacccctccctctcccttggccacgcacggctgtgatggtggccggtggtggttgctatgggcgactagttaggacttaggatgggccctcggtggatctgagtgatggaataggagaggtagccagtgagcgagagctcgccagcccatccgtggaggcgtggtggaggccgaaacggagcatcactgacccagcctcttcgcgtgctgcactgagcccataggtggcacgcttgcctgttcgcttccagtccgtgcgccttggcacactatgagccctgagttgggagagggaggagggaggaggagcggtgcaggtccttgccgtcatcgtctttgtcgccacagccgcatgacatggaggtcgaggcgaagggagaggaagaagatgaggcattggagtcacgcttcgcgggagagttgtcctgagttagcaaggagcttcaaggcggcggcggtgcagcgacgaggaggaagctcgggctgttgaatagttccacattggttgtggaaggctaaatgacctaatatataaacggggaagcccctcacctcataggctagcttttgaggtgagaaaggctctttacgatcctacaactggtatcaaagcctgactacttcaacatctctgacccgagagacactgtgtgaaggcctgatggaccgtgcatgtttgcgggcttgtatatctgagggaccgtggggatacgatgaaagggcagtgaatggttgagggacatcaatgttgtgaatgggggagattgttgaatagtcccacattggttgtggaagggcaaagaatagtgggggagcacctcatctcgtagactagcttttggggtggaaaatgccctttatgatcctatacagactacaacccaataggcccacggtctctacttccctgctaccgccacatcggacttcctcttcctacccctcccaacaagctcctcgccgatatcctttgccgccaccgtcgagcacattgcatgttgtgcccgcgtcaacgcagatgaccaccgcgtcggcttcgagatgaagagggagaagagagaagatcatgcatagcctaaattcatgttttgagattaatcttggttggttgcatgcaatatattcaatgatacacatttacttttttcacaaataaacaaaaagatacttgttagatgatcattttggtaaaacctcaaaaatcttagaggatgatcaatatgggattgagggagtagtatttatgtgtaagtaataggctgactctagcaatattattatcgaaaatgaaaaaaagaacgagaaaacaagaagatggaacaacaaaagaatatggggtgaaagttttagtttcacatcacattatggcgaagaacaaatttaataatgttagcgtattatcgattaatgtgcgtatataccataccatgaatgtaagcaatttttcccttcatgttaccttctctcgattttttcctaacatgtttgtctagattaaatttttaagagagaatctattgaatttgttgttctataatatgctactgagccatacttaacttctataatatatcattgttgtgcagtaagattcattagtattgtatactcactccgtcccaaaaaaaattgaatataggactagatgtgatatattctagtacaataaatctggatgtatgttcaaattcgtgtgtcacattcaatactagattagttttttatgagacagagagagtaatttttttaatgaccgaagtacccttgagatgaaaacttttaaaatctgctgaaaatttcgaaatatcatattgtaaactagcactagaacctacggcgcgcttcgtggcgcccttgctgtgtaaataaggaaaataaataaggaggccctgaagagcctattcagtggattggctgtagcaccgctagctatagcattcaggttgtgaggaaaaccagtgatggattaagtagacataaaatacatagactgaatgttaacattgtttgtggagaagaatgcataatctagagtacattatacatcacaaatacaaccattggaactaacatcgataaataggcaggaaattatggggtagattggtgagggccacgcctgcgaaattcgagaggaagacggcgtggaagcgtggctgggggaccaccctagaggcgtgaggcaaattctaagcagcagcgccggcgcagcatccacgatcccccctgcacacgcacacacattcagaacagtaggcagggagcataaatcagggcagtagattacctagtgttggccattgatgtaagagcgaaaaggggaaagatgagagaagagccaagaagacaaccgaagcaatgcagctgtttgaatggcctcaatctctactaacgaaccgggtaagaggaacgataggaaaggctagggccatgccggatgcatcgatgcctgcgcgcatgccggtacggctcgtgcgcaggacgatttgatgtggcctgacgcggcacgtcagacactgtagcacgcggcgcttagaaaaacatggcacgatagactcacagcctcttggatacacataacacatggtatatgggacaacccacaaaaccgaccccacctgtcattggctctgcaacgaataggtgcatgttcatcatttatccaaggtaataaccagtaggtaatttgcccaatcctttcgttgcactggatgaacgtgctcctaacgcacaaaacacaggtagagaggagcactcgtgtgaccagggattacggtggaccagacgttggtaggagaatcatgaagaaacgtgcctgcctcgcactgtcgcacatagtgacatcgcatagagaaacacgaggctatgctgggtaaacgtgggggtgcaccaaaagtcaaggctgtcaggcagggagggagctacataggccaggcgcagcatggaccaaggtgatttccaggtgggccatagagcgttaggaccaatggcacacacgcacccaaccacatgcccacggtgaaccacacaaaggatccaaggcatcacaggatgaactataaacaccacctaattaaaccgacaaaccaaacgtgatatattcatcttattaatcacataggtaatatgttctgtgtagcaacacgaaagacacatgctaaattttggtggcagcatgccacagaattactgggcaaattcctatcgccagcagaaaatgatgtgatattttttgttacagaaaactaatctgctattgcctcttttttttctggaaaatgaatctccatatcgaatctaccatgtgctctgagaagcaacataccatagtttttttaatggctatctaatttgaccatgcaaaaatctgcataattcaaggtaagaacagagagaacagataagagctgcagttacaacaggctgtgtatgtggaggaatgatataattcaaggtccaaatattagcaggatctcaaggtctaaatattagcaggatccaggatcactaagtagaaataaacacacacggagtttctgtttacagtggcgccataccagattctggataggaattttcctaccaatatatcacccctgtcctaagcacatatccagttatacatgcttgcttaataggaaactaatctggataggaattttcctaccaatatcacctctgtcctaagcacatatccagttatacatgcttgcttaatagaaaactaatctgcatattgagtgttatttttttgctgtagtaaataaatctgcatattgaatttaccatctgttctgagaagcaacatgattcataggcacaaatggatggggatctaggacagaagccctgatgtacttgtctagaacactaacttctttcaaaaaccagagtcagtattgtgattttttttatcaaacagtcaacatgcttgtatagaacactaagggtgtgtttggttcctggtcaagattggatgggatacggtggtccatattttgctggatatggcggtccagttttttgtttggttgtagggacaaaggtggatttggtgatccaattttttgtttggttggaggaagtatggtggatttgtaggtgtggtcacctctcacttgagatggtgaatataccccatcaaattaatacataatacacattccattataaatacacactccattataaatacacattccattataaatacacatagaaaaaagaaaaagaaaaaagaaaaaagaaaaaaaagcagtgccagatctgggctcgccgacgccgctagcagcctcctcccgccggcttcctcccgccgccggccgcctcctcccaccaccgaggctcgcctcctcccgccgccgccttcctctctcgtcacccgcgccagctgccgagctcgtcacctctctcgccgcccgccacactcgtcgcccgcgccagccgccaagctcgtcgcctctctcgccggccaccgcgctcgttgcccgcaccggccgccgagctcgtcgcctctctcggcggccgccgcgctcgtcgcctctctcgccggccgccgagctcatcgccccctctcgtcgcccacgccggccgccgagctcgtcgcccctctcgccggccaccgcgctcgtcgcctcgctcgcgtcgtggtggtgaggggtgacgcgagttacgcaactcgcttgcccggctcgcccgagcctcgggcggttgcatccggccaaatcaaccggatccctctatccagcatctggaggaaatattctcctctgggccgccctatcccactcccaaacaccctccaaaaagcggtggccatgtcctatccgggtatatcccaccaaccaaacacaccctaacttctttcagaccagaaactttaatcgctaaaatcaagcggcaaacagctactttaagtaaaatcaaggaaacatttagcttctaataatcctaacatatccaagatcagctaaaccttcttccaatcacctgcgctagattttaagaagcaacctaagcaaaatgataaacactctgcagtaatatttacatataagtgcttcatctagtgccgtaggtaattgcaaaataaacatgatggttggcatattcaaacgaaacagtgagagtctgcacacctcttaaatagaagcatggtacaaagatgaaatattacatgcttcaatgaatctggatacagaaagaatgtccagtgccaattggatacagaaagaatgtccagtgccaattgtacagaaaatctgcataattaaaatcaatatataaaggcaagatttaggggaatgaattcctatataaagataaaatgaaaggccactgaatcctaaccattaattttctggcttcctcatcacaccaaaccactacaacttttagtttggaacaatatttgctagctgcttcattcagcagcaagcagacagcagtaaacaatagcccaccaggcagcaaaacgaatcgccccgatgttgttgacggctgtgagagtggaaggatcaagtctgtagccatctgacatagaggaaaaaaccagatcaagactatctcacggtaggcaaagcgagtaaaaactgaagaaaagcaaataaaaaggggaaccacctcaatggcgaccgaacctggcatcctcgagcttgtttcccatcgcaggccaatgtctggttcttgagtgagtgtgtccttgccaaatgctcccaccattggtccatgggtcgcttcctggccgaggctaccgtcgtcgcagctccgtggagcccaacacaaaacagggtaactgctgcaacgggtggcgaggagaaacgggcggagagtgcttgagggtgcggcaggagatgggcaggacatggaagagcgcgagggggaggccgtcgccggcgaaactccatcaccgcacccaaatccaacgctgcgccatccagtccctaaatccccttgctctactgggaggggggtgatggagggagcgccaagagaggaggagggtacgggagagcgtgaggggaaagccgtcgtcggcgaggagaagccggggaggtaaggcaaggcggcggcggtgcaagggcaggggaaaggaagagaaagggcgggagaacagtgatgtgtagggtttcaggggaatggagaggataggatagggatgttctcttttgcagaaaacacacttatttcccttttttcagagcgcggtcctatatctagaattttgtctccttcacatagtatataccaagacattgagggctgttacgaaagagtacaaaacacaggaacatagggtgagggacgtaagagtaattatcaagttaatcgaggacttttttacaagatgaccagttccaacgcagggcgatgtggataccaccagaagcgaacacgccagccaaaaaaccgcacaatcgctatggtgcgagcattctgcgatggttttaatatctccgatgcacatctcaaactttgcaagtgcagttttaaagaaaaaaaaagagataaaaggtgagtacttgagagtatcttccccttccctgcgcgtaaaagaaaatctcccgtctcgtctcctccgctacttgcgccatcctcggctgaacaggggagaggcgccgatctccatctggcgagcagagcagggcaggggaggggatcctggtgagcatccacattctatttctgattcatctctctctctctctcccaccgggagtacttctgtctggaatttgctttgcgttaaccctagcttctcttctagatctggaagaagctcttctcttaatttcagagccttaaccttaatacaagtaacagtttgcttgttccccacaaaagtttagggtttcaactgaatccgcatttccccccttggttgctactcatctgggaagttctggtggggcggtttgagcactgagaaagtatcaccattggaaatgagtgcaggtgtgctgatcctgaatttgtcctctattaatattttttttctacattgatttgctctggatgtatgtcacaaccgtgaagaacttatgggttccattaatccattcgtgtactgactgtttcctgcttaatctcccaagttaagtgatgctaatgtgaagttcggaataactttgtgggctctcgcaggcggtgcgtttggtggaaatcggggcgtgaggcctgtgcctcccgaaaagggagtgttcccactggatcacttgcacgagtgtgacttggtaagtttgcacaccttttttgccccgatttttttggtgtcataacttgtcatgtgacaactgcacgttcaaacaggagaagaaagattatcttgcgtgccttaaatcaactggatttcagtccgaaaaatgtcggcagttctcgaagaagtacctggaatgtaggatggagaggtgatactttgacatattaatttcagatccatgacttactcttaccatacaatggttagctcaatctgttttccatgtcttgaaggtttctctttatttcgaggcaaaaggtcttgtgggggatattttgatgcttgtagtagccaactttaagagaaatcaaacagttctattaatacctgaaattcttgctgtgttaagagtgcttaagaacttcgatattccaacctacctattcaggctcacaagtcgaaacattgaagagtttgtttttcagttgtaggtttaatgctgctgtttccattataaattcaagacatgctattcttgtgtattatatctttgtgaaaaatatctttgttccagaaacctgatggcaaagcaagatatgtcagagcttgggtttagaagtgaggatgtcatgaacccatcacccaacaaaaaaaacaatctggaaagttctgcaagtggtccaaacgaggaaagatagctgtttgattttgaggtagctttggttctaatgcaaggccatcatccaggaaaccagtcaagtctaattataaagaagagaataaatagcaagaagatgaagggaacaaacactatgaaatgttgaaatttcctcttcaattgttaggattgttagaaccatgtgacacatgcttgcaagtaatttcttgtgaatgttcatcgtgaactcataaaactgtttgtttccatttctagtaaggcagcagtaaccaccagttttgtttttagattatagctgcatcactttcggaagagcaacttgatagaaaatcgctgatatctatactcatttaaaaggactccaatggtggtggcggtgtatctgccaccccacctatttccattgtagttttacatattaccccttgaacttcttaagatcacataacatctaaatctaaatggttagctacatataaaattaaacggaagtgagtattctctataaaaaaggtggcaatatacttcatgaaagatatgcttttatttattttggaaatattatgatatattttcttttagcgtagcaaagcacgaacatttagctagtacctacaaaagttctgccagtttgttccaaattttgttcttaagaactaagaagcagatactataatctgcgtgcatttggtggacgtatgaaggcgttacttcactatcaaatttaccttttgaaatcctttcagtttattagccggatcacgaacttgccctgttcatgctaggtccttaaactccaatatttattaattgaatctccaaatttgataaattgctcttcttgagctatcacattgtttgggctaatatgatctccaaagaaaagtaggtgggtttattagtgcagtactccctctgtcccaaaatataaggaattttggagggatgtgacatattctagtactatgaatctaaacaggctccctgtccagattcgtagtactaggatatatcatatccctccaaaatcccttatattatgggacggagggagtatgagtcaaaagtcagccaaaacatggaattatgccgtgttgcttgtcctcagatcatcgtcccatcccagccttgttttaaaacctttcaaaaatagcattccgtgttccttgatcctgtacctcgactcataagtgaggaactttggtgacatgctcaaatctaaaaaatgtgcttgccttttgtgtcatgagtcaaattattagcggtagtttttgtttggtattgctgttggtactcaatgatcaacgaccattttagttgagccatcatgaatgtatacttttgttgtagtgatcaccaagctataccttagaaaattccttatgttcccctgagtctttgctccatcctttccatgccattgagctttgtcttgtcttgcatgccctagattttttctaatcccctctatacacattgggtgagttgcttcataaaaagcatcattctcaaggtgaaaattgtttcagttctaaaaaaatagaaggggatataattatatgaccccaaatttgaaatataaaaattataatttgaaatgagtttcaatcaaatttgatgatttttttggagagtagattcacttatctccatggaaattttttccaatttggttgaagttgattaaaaagatactccctctgtcccaaaatatagcaatctagtactggatcgaacataaacttgtactacaaatatggacaaacctcctgtcctgtccagatttatagtactattaggttgtgtattcgatactaggttgctatattttgggacggagggagtatttgttttggtgtcgaagaagaggagaaatagaaaaatggtggtttgtgtaatttatgtattgaaatttcatcaaattttgtttcaatacatttgaaaatttcgaaattgaatttcaaattttgggtcaaacaattttgtgtcattcattttttttataaaggttttaacctcaatatttatatgaagctagatatgtttgagcgaggtgcaatatagatattttgtaaaaatcgaatagtaacaaaatgagttgaggtgattagtacgtaaactcggtggtatctaggaataaagaaagaatcaggagcatgtatagaaggatggagtgaagacttaggcacacaaggaattttcttatacattttgcaagagcagcattatgtttggctcatgtctcatattatagctatggtgaccgctcactgcaaaacaagacaagttattcttttcttggattgtatatttaaaagcattgccttgcccaaaaagatccaaaatcataatgtccattaggttggttgtttgtcatttctattaaataaaatatagatacatccaatttattcaaatgcaatgtatcatgtggatatatatgaagtcgaaagatgcaacaaactctcttgcacatgttcgttattcatagagaatattgttgaatcaccccttgcttttttctgaaaacaatgtagtctattcatctttgtcttgggaagtattaaaaagttaataacaatatattttttttgtctatcacttcttcttttgcaaagagaagtacaactgattggttttttataagctattctagttaacatcacgtagtgtttggaatgttttaagaccttaccaaccaaaagtatccacaaataaaaataacatgtactccctccgtcccataatataagggatttcgggatggggcgcacactggtgcgtgtgtgtttttccacatgaaccactagtttctgggttcttccccttgcttccgaaaccgtcacaccaaacaccattattttatatggaacacattaaattccttcctagaaaagggaacccaaaactgaataaatacgccaacggagctagccatggggagcataagtttcatttgccatgtgagtgcccgtgagtttttccctttctacaattcatcttccatagaaactgtggtggatggatctcaagaggagagatgaaggagctgaagaaagctttgtcaaaccactgcaacttaaggtgaaggattaccctttacttggagtccatatctcggaatgccagatctatgacctagagaaccacatgatctgttaccaggtgagcaatctctttagcttctatggttcactatggatctgtttggtggtttttattccattcaatattttccctactgctatacctcagaaaagaagagatttcacaatgattagctctcagcacaagaggaggccatgtgaaaataaatactgtcgtgagtacctggtgaacatgtacgcaatttatcccctttttttattggtgtaatttctcttatgtctttttggtaattatctgtgtgtttcagcaacataagaatctctgagcatcttgctctgctctccatttgttttttatctgttcagatgcaaccagagtgcagaaggggtggcgcagaaggtctggaacttctccaaatgcaggggcatgtgtagttaccgtttatacaggtaagccatgtgaagaacatgcatgccatggtagattataattttaaggttagatacttagatttgatccttttaatttggtagaaagaagaattgggagatgctggcagagatactggatcatgctgtcaatacgttgggttacacttccgtccataaattgttgaacaagggttcatatgtggtggctgttgcagagatgttgacatcaacccctctagaggtgaagtccaaatgatattttcttcacaagtaacacaaccttctggattgtatatttatttttttagaacacgcaggagatctgtgtatcatttcattaagatagagggaaaatgattgcatatttaaaggcattgccaagtccaaagaaacaaatcataatatctagttggtggattatttgtcacttctactaaattaattatagatacatccaatttgttaaaagcagtgtatcctgtagatatatatttgtagtcaaaagatgcaacaagctctctttcgcatgttgtttattcataaagcccatagcatcgttgcaaacttgcattgccgcttgctttttttatcatatatagtctattaatctttctcttgggaagtatcaaaggtgtaaacttaaaattttacttattttattgtttgccccaaagaagaaatagaaccaattaatttataagctatgctaggcatgaaaacattacattgtgtagttcttttcgaaaaggagcatcatcttcttttagaatgatttaagacctgaccaattaaggagatacaaaaatagaaatcacatgtagattggttgctgtcacatttaatgatagaaataagttagataaatccagttcttttgaaagcacttcaatcctatagatacaatagaaataatatagaagattgcctggtcgcagtactcacacttctaagcgtgttagatgatggttgaaccacttcaccgtaaaatatatagccatggctctaggcctttccacactccaaaactgaaaagagatagtttaggagggatttactagttacaaattttaggagggatttaaatcatttacatctgttacaagcagcttaccatttatgcttccagatttgcacattaaatgtatttgacaaaaaagatttgtacattaaatgccttcccttttcacacctatgaaattaaatatatacacattcttggaacaagttgtgaacaaattcatttgactttacatcacagatctgggatctctgttttgcccaagcactttcttccatggaaattgtgatggctggcaaggcttgccaccaggtaaatgacctaagttgtctttccttttgctattctattgttgtttgggtcacatggtgtatgtcttaacgtttgatttctccgtttgatccacagtgccgtcaaatgaaacgaaactttgcagtggcatgcacgcaggttaagaagggggtatgcccaataaaatactgccataggtgccttcttaagaggtaagaattttcttccctctattttcttggcaggtgagattttccttcatagttgaagacactcaccatctccacagtggaggaaactgattttctaagaatatatcaatctacttggctttggtttgtgactaattcttttaggtatgatgagaatgatgaagaagtgggacagatggaagcctggatctgcccaaaatgtagaggcatctgcaactgcagctgctgcaggtaagccatcagaagctgatatggaatggtaatcaatagctgcagcagcttactttgtttggcatggcagaaggaagaaaggacaacaacccacagggagattggtccacactgccaagaaaggagaacaaggggctgccgatgaggtattatatttgtttttatttggcaatacatattatatttaactgtttgtcaattctttgttgtatgctgctggttcattatggttaacaattgtaatgaacaagcaggaaagcacaggtagatcccttcggatagagaattctgttgaagaattgctggtcgagggggatcaaataaagctgaagggcaacattgtggtgaataaaaattttgatggtgaaagctccttggctaaagacaaaaatggatctatattgggctataatagcgcagtttcttcacccaataaaaaagtgcttccaaggggtagtctggtcactaacattctaggtgcagatctggaggtgaaagatgttggaccagcaattcagttatacgagttctgcaattcatttggcgaggtaattgaaccaacaaccttattaatagcatggcgacacatgtcttattatgacaacatcttgctagcatacacagacagttgaattaatgtaatgtttcttagtaaaagaaatctatgtgactccaactagacacatttttgcttctcacctaatagataatatcatggactccatatttttcacttcactatcctagttatataaaaatacaatacatcttaaagaatcggatttcttatttgtcctaactctttctttgtatgcgcaaatatccaacaattccatgtatactaattcgaaccggttggctcaagccgaaattctgttcattgaattaatggctgtctgtcaccaattgatttgcagttaccaaagttatctccatagaaagttttcttgtttctattatataatactgtaagctcctttatcttctataaattatattttgtattctaaatggaatgacatataggatgattttgatgcagattttccagataaggaagggccaacctgaacaaattctacaagacatagcaagagatcaagaggttgaaatagtacccgagcttattgctggctttcacaaaaacttgctatcggtcatcaaagaagacagaggggagaagtaaataccatccgaatcaaaatttccttcattttgttcaaatttttggtagtaaatcgataaaaatgggttattttgtttccaggaattcaatctacataacaaatggagatgcatggttaaatgatttaggtgcatatatcaatgaattggcatttatgtcaaaggaattgcatcttgaatttgtaaacaagggaacattgggatacaacaagctgagtccttgtaagctgcatgtacttaatttactttgcgatgaggccctctctaccgtgtaagtgcttctttaccacatttactggaatgattcaatttattatagtttatattgaattgttaactgtgtcttaacctttgaacagaaagttaagaaaattgattgaagaacaaaatggaagggcagctgaaagaaggaacgatgccaaagcaaaactgcgggctgcaaaagcaaaggtccttaatgctgtcaagcttattactgttgtttaattactcacttgtatttctagtaataaccaacacgactatgtcatttcgcaggaaaaggaactaagagaagggttaaagaatgacatgaaagaaggagcaacccctattgaaggaaacagaaatcagcttatttctgatataaagaaggcaaaggaagtcaagctgacagccataaaaggtctgaaccgtttgagaggacatagctacatatctttgaacttgatttgttttagctttatgcattttgcccacagatcgtaaggatattgttctggtcatgctcacggacattgtgcacacatgcagagtgcgtatagcaggcgggagaaagtcaaggggattagttgctatcttttgaaagaaggatttgttttcttttaattagagattatgttaggggcgtcctataagagcatgttcaatgatagagcctagtatggtcataactagttctgtcaaaaggagtgaaacgtgataatgtttttgatagataattaatagaactatatattgtgtttggaaaataaagaatgctcgaatacaaaccaagaaggattccttattatctttatattgttttcttaaatagaaaatgcatcacatgtaggaataaactactgaagctttctggttgagatatcaaaaccttagaatagtctccatcatgacacactgatcaagttttaattatttacttatttcaccttctctcgttaagacaacattcttttacttgctgtttttatttatcctttttttttcatatttagctagtttgaagagttgagagtatgtttatctttcctgactatgaattaactgaatggtttgtcttttgtccttagcatttcaaatgaaactgttttgagaagtcccctactttgatcttattggtacttcacatcattctttaatgtgtagtgagaactgaactaagtacatgtgctttactaattctcttgtttcatttctcacactgtgccaacaacagagaagaagctgggaactgtccttaggagcaagcctttgatgttagaggacagggaggcatactggaagctggatggctattcgaacaacaagatgctattgctgcaaggtttgtttgattctgattattgtacaagaaaattcaatttattccatgacaaaagaaaattgtgataaataatgttgcatttgtatcagaatttgataatgagaatttcactggaaatgacatctggtttgagttcactgaagatgaagaaaaaacaattgaaaatcatgcagccataaggtaatctgttaccatgcttgttttctttatttaaagatatgctatctaatatttaattatgcattggatcctgtaattgtagcggaaatttcatttttatcttgttttgtcatgatttgacagctaagagtgtagtatacaccaaagttaattgctgcatatgttagtagcttgaactttaatgttttctaataattagattaatgaatgactatttgtgtttaacttttatgactatttagggatccctaaataggtgccagccaaaaagggtattgggctagtcatttgaattaagtaatgaagatcattctataatctcttcctcagttcgtcatccttgcctataatcctctagctgacatgcgaacactgcctagatatattcctggacctccccatgatgtctatcctcaatgaaactagccatagcacggtcaccagtggtagtaaaaaattggtaaaattactacataaagaagataatacaacaaatatggaaaaatacttgtcaaattaattgataaatgacaaaccgaaatggtactttctgttatctactccattaatggctgtgggtacatctttctcttcttaaaatgggcttgtagaaacaaactgccgattagtatctgggattaaaggtacttaataacagtcacaaggtgaagcttctgaatacaactataatgaactggtattacgagtgttaactatcaactgcgtacacacatggcagtggtgccttgaaaaattcgatactgtaaaggtatcctggtgtgtattatgataaatcaagcaataataacacgaaaggttttatccaaccaagtccatgtcgagcagagcctttgttgtgcaatgtgagcctgctttaccagagtggtttcccctatccttctctgaatggttttgctgttgtcatatcatttgatatatcatgcccgttccttccgcctcaaatatccaggactccacaccagatcaatctgctcgcctactgcaatttcagccactgtccacctatcaactcattcacacctgccaattgccatcagtcccatcccactatgctaccatttatcttctatccagtgtttagaaaaaaaaaccaataaagcgctagcctatgttaatggacactatgaaataaagttccatgtcatatacaaacgtacactaaactagtttggacaactggggtgtttataggtggaggtgatgatttactatgacaataattttaagtttacgaatggcatagaaaagtattaggcacaaaaaatgttcacaacttctgagaaggatgaaagttgacacttaagactatactcctatggattggaggtaaggaagagcgagacataatctataattgaaggtcatgagagcatgaacaaaattgaatgctgggtgaaaaaaaatgtaacatacccatcaattcattattctgtggactcactttcttctttgcgttcagcccccatctcctctgccgcaagtcatcatcggcctaaagtcagtatcggcttcagagtcttggaattggaatcgaccgatgggagttatcaaatcgccagcagttgtgttcatggtggagtcagatcaattaaaggaaatttatccaaaagattgagttcaaggagaagagttcgagttcaaggagtatgcggcatggcaagttatctattaattaggaatagtttgttagttctttttatctttaggaaagtgtttagtgtctgataagaacttaatgttttctttttatctttaggaaagtttctcttgtccttgtcctacaaggacaagtatctccccatgggtataaatatgtacacccggagtcattgtaaggaatatttctcgatcaatacaactactcggcgcatcgccatcctctttaccgtggttttttacttatcatccgacagacgcgggatacatcggctttcgatctccggtgaaggggtaagtcctacgtttcgtcggcactggtgaatctatcgactacattggtgttcaaggctgcatcgcttcgatctcttggatcgctctggtttggttgatatatttacctacatgatgttagaatttcaatggttactctcattgagaagaggatggcactcgagatggggcaattttctggttttcttcattcactaaacacaaaagccataccttcccgagggaggttggatacatatatatagccatagctggctggatggctgctagctaattgctgcccacactagtctaaaatttgaacgcaatgctgtcctagagagcatccaaactgaataaagcataaaggagatgctagatgttgtcctagggatgctaaaagcaaaaccgaaagatgctaaaagcaaaactgaaaggatgctgtcctaaaagaggaaaaacaacctaaaagcaagagaaggaccacaaggaccaaagaccacaaggcttattccatcacatgatatctcaattctatctttagttgcattgtgtttagagatttgcatattttgtcagttgcagggtcaaactgactggcatgctcgcacctcaccaagatttggacctgcattctaagcagatcttctagggtagtgtgtgtttttcgcgtcaacacatttttggcacgtccagtgggacacaagttttgcacccaacatgtctgaagaggaagtcaatgctaagaagaaacaatctactatgtcgatggttgaaacacttcaagctacagtcgatgaagtagttcatcgtgcattgttcgaacaatctggagttttggtggatatattgcaaaatttgatcaaaatgacggttgatgagttaattgtttaaaggcgccagctcggggggcaaacatatcagtatcagcagtatgttagctgacaagtgcagggagatcgatgtttttttttataaaaatcttctttcagggtagatcgatgttgatctagaccaataagcagattttgttttaaaattctcatccaatcaactcttttttctcctttcacccatctattcttttttcttttcattcttggttcatgcttaaaattggtttcacgcgtgagaaacgatttcatcttttgcccctctgcattaactctcttgtcacctaactttttgcttatgttgcattatatttaacactatgcaaactagctgaggtggatgtttggaactgtccttagaattagtttatacaaatataataagttttaatttataaactctaataagcttatgagaacaaagcactcttaagaacaaatctatgcatgccattttcatgttttatagtacgtttattgaaaaactttggatcgatgatataagatgcaaaggtttgaaggaaaaaactgtactcctaaagtctaaaagatcgtacttttagcctaaaaatttatctcaaaaattgtacttttgagtgcggtactcttcgtcttagcaatcaaagtttcttctcgttataattccctcatcgctttctttccccattcatgatgagcatattagtcatctagcgttgtccttaatccacctttaactaacacactactacagaaaagaagataggtgtcggttgggaaccggtcataggtgctgaattttccaaccgacatgtagtgaggtctcaaatgtgtcagtttaaaaacctacaaataacaaaaaaaaaggaaaaaaaaagctggcttgagccggtgcatcgagcaactccccttcacttaccaaatttcatcagtattaatcggtgtccaagaccaccaagtacatccaagaacactacaatattgaacacatcaggaacatccactaccgccgctgtagttggatggagaggggcgagcctccttctccatcaccatcgttgccaccgttccaggaagccgctgacgcccgaggatccaccacgggaagtcaccgacgctactgcagccattggattttgtcgtggctttgcccatccttggtcactgctatccatggtcacatctagatctgccacgggatctgccctgccatcggcgccgctccacctcctccggcaccagacgtggcggcctcgacggcttgcaccgcctccgggtggattgacgctgaccgcatcgccctcatgactgggaggcgagtggagtggattaggacacccactctggttcactgttcattttaagtcattaaaatggcaccaattgaaagatcccacaaggcctccttataataaataatgtgaaaagtaaaaccttggcggcctagcttacgggtgtcggtttttttaaaaacgggtacatactccctccgtcccaaaatataatgccacatccacccaaaatcccttatattttgggatagagggagtataatatattacgtgtgttgattttttattaactagcacctttaaatataataaattaaaggtggtggtttttttaaaaaaccgatatttattatattggtgccgatttttctctagaaccgacacctatttattcataaaggtgttggttgtcgattttagttggttcgacacctatagtgttgtatgctttgtgcgttttcgtggtagtgacactagcaaaagtttgcttattagacattgcactaaactagctgaactcttgtttaactattgtaactcttacgagtaacaattaaggatttaccactaaaatcacatatcatagacacatagaaactcatatgttatagactgtaagtgacaaatctatcacatcttaaaatgacaatattaaatgcccccgtactcttttcacatcttaaaatggcaatattaaatgcccccgtactcttttcacagatggattgagcagacgacaaggttaattactacctctatcccaaaatacgtgtcgttctggattgtttagcatgtactaaggttaagagataaagactataataccccttaatagataatgtatattttgatttgagatggtggttaggggtagaatggaaagaaatttgaattgaaagtggttgatgtgataaccattttggaacaacttttgaatgctagaaagactagtatggtggaacagaggaagtaattaagggccagtttggtttggtgccataccaaaatcttggtgtgctaaagttgcaaatttggatggccaaaacttttagattttactatctaagagatgttagattttactatctaagagatgtgttgttaaaatttggcaccaatccaaacatagaaacactgttaaaaattgcaaatgaattggtaggcacaatttggaaccaaaccaaactagccttaacgctttcactcaattattaattgtaactagcccgagatcgaacggacctcgattgcctgaaccagaatgcaattaaccagagatgagaggtatttctgaaaatattgatcaggtggcaagttaatcttccccattcccatggtgtttaagtaaacatatgtacttgatggttcattttatacacggaatgttgaaaaaaaaacagaactttagggatgtcccatactttggtattttgatgtattgttcccaaagtacgcaactttagggatgtaactgtagtactgacatactgtacgctgaaagactacatctaaagcaagtaggctaattctattattctatacaaaactagtactcctacttttgtattatcaaaggagtatatggatggggatgggcatgttccctacttttgcatggtcacataataggcttggttcaatctcttttttttttttttggttctccttgtccgttctctcctatccaacaccttgccaaagccaaccggccacctgctttccatgtccaagaagcaaacagcttagacagtctgcatacgacatgtacagaggtattgttccttgagcatctataatacaagaaaaacatcggtcgtcaggtaagatggaggactcaaccaaccaaacggactatactgtcaaccttcgcttgctgtcaggaggctatcagactattttgctacctagtatcctgcctacatgaacagtcccaacagcacgaggaccgccaaaaatagcagaacacatttcactgtggtttgtccttcgcatcagattcagatgcatactctagtgcatcaaccacaatgttgttggccacattagaatcaaccttcaaagggtcaattgccgttgaatcggggatgtcgttctcaacttgtgaagggtctatgtctacctcacttgcatcaggattgtctttcttaacttttgaaggttctactactatagtatcaggatcgtctttctggtcatcttggccttctttgctcttgtcactgcctttcctgctgaacatgttcttcagattatgagctgttttgttccccgcatgtttcaccatgtgcacagccttcttcctcaaatgcctcttggtcggactttccgactcgcctctctcaggactggaatgctggtcatctggcaagttttcagaaggatcttcatcgacgacgtatcttactgacacccttttttctccaagtggttttatatttgggtgaggcgtcacacatggcgaggcttcatcatcactctctttctttgggctcttgaacatcgcaccagctagtttccccaaaccctttttgaccttgtggagatgatggcgtgatttgccattggctggttcttcagtactggagtcacttctctgagattctgattggcacgacttagggctgtcacagtagacatcattctctcgtaggattctggaatcctgacacctcgcacgtcctttccgaggctcccaagtgactgcgacatcactgcctggccgatggacccaaacatcaaccttttccagtccttcaatgtctactggctcatattcagcagatatctttcgaaactcctctgatgattcactttcattgttggtcctggacgaaaagctagaccttggtgtgcttgctttaccccccttgggtgttccacactgctcatcgtcatcgtttggaacctgcaagttcaagtatgtgatatcagcaataaatcacttccctgtcaaaaagaagaaaaggtacactcaatctgaactgaactttcgcatttaaacacatggtagagctcatgcatgatctagtgccagccaagaactgcaattctgaccagctcaccagttccaaacaagaatgataaaaaagaactctagcagggtagccgggaaataacaattcaaatcttaaaaccctcctctcaccttttcattttcatcttcaagtactgttactgctatatgaatccgccctgtctttatattcttcagagcaatccatatgtcgtgcctttgtccacctctcaatttgttgatgcttatggaacagtcactacatgagaagtgagtcaatgtttagccttattgggactacatggaggtttgcaacctttgtatgaactataaaatataattcagaacactactaagtactaattggaccgttaaaagcaggttccatggacggtattaaagagaccaacccgagtgtgtcgtcaaagatgggatccttatctcgaacttgaagagagagaagattgagagctgcccatgaggttactggtattttgaactcctccatccattttggattgagtgttttcttgtggatctttgtctggaaacgatagggtccaagatggcctttcacgtatggatcagctaatcctgcacatagatccatcaaagcagcattgttgtgagaatcaactaaatatgaacaaggaccagtacagtaattcaacagagaatctcttgtggaattttcctagtcaaatatactatatatggacgggcttggtagttgagaacataccatttggatcagagggtttcatatcagcaccttccaagatctctaccttggcatgtgcaataggtggcttctcatcaacactaaaccagctatctgacatatttggataatgaatttgttagtatcatacaatcatcattgaataaaagcaatttgtgattcaatatactatcagtgctgtgaacggtattcaagtttgcttgtgactatgggtccatgttccacatgccatgtttttttctgactgctaaattttactaaacttaaaatcgtattctgttgcaatgacgtaatgtcatccagacatacataatgaacctcaggaatgacaaacatataatgttctgttgcaatgacataatgtcatccatacatacataatgaacccaaggaatgacaagcatatattctccttgcctgtttggatggctgcaagtcaagtctagctcaccataaaaccaaagccaacttaatctttgcacctacattgtctaggttgaacactatgggtatcatggtaattcactatggagattgaatggaccttccctaccctttgtttttgttttcattcctcctatatttgatgaaacgacacacagttctcctgtgttgttcgagcagaaaaagattgatagaatgaactgagaacttactgagctagtcagaaaaggaacgataacaagtaaaaaaaatggtgctctcacaatgttgaaagaaaactacctgttgattccgatgcaaacttttccaagtcaataactagcatattaggctgcaaaaaacaatttcacaaaattatttcttgttgcttaagactagaacaaaaattgtccaagaaacaccatcagctaatgccaaccctatccattctcacacacacgcagagaaccaatgtttgatatatagtcaaaattgccctagatctgtcttacccaggaacaagtgagtcctaggattacatgcagtgtggctagcagctctcttaatattcatattttagatttgtaaacatggtaatcgagaaaaggagattggtagaaatgatttgtgcaaattgtcttgaaacgttctttcattattatattctcagtaaaatttaatattgtactacaacagaaactagcagtagctccattgtttcgtaactcaaattgattgaattctaattaaaacctaagtttatatgttcataggaaattctcaaatatttcttgcttcatatagaacttaaattctaataagctatttcaaccacttactaacacagtgaaagttgcattttgtacaatgttgatacccaaaacttcacttgtttgtgactggagggaacagataaaaaaataacatgtttgttgatagaacagattaatagcgaaatctgacctcaacaagggtctgtccaaaggcgacatccaacatcctgtcctgccatatccaaaacaccaaaagtacgttctcaaagaattgcagaacaattcaatgcagagacaattccatatacaagataccagaatgggaatggaataagacttacaagccatccagaaattcctggaagttcagttacatcaagcccatgaccaaataatggtttgactgtcatctggaagtatggaggctcaacaaagcacactcttacgcgaccaatatatggccactgtcggagaaatcgcaccccaactaggacctatgtaagcataaattctagacaatgttaagtaagcacaaaactgtattaaactttacatattctacctcaaagagcttaccttcccttcaacatgcatcccagttatatgcatgtttgctgtgatgccaaatcctaatctcttcctaagttgcacagccattgttgcattcatatcatctgcagataggaagttcattcctatctctaaaacctggcatgttaacttatcttataaattttatggtcgattttgagtaaatatccagaaagagaacatttttaaagcaattgaacaactgaggcatataattacacaccagatggtcatcatcagttgattgcctgacaaccctaatatctgtaaacattggtgggttcctgcccaagtaaaggtcttggatcactgctttcctctgcaagcataatatacatcagtattatgtaaccaagttggttaagataccaaaccacatggttctttttaaaagtatacgtgtacctctcaatttatttaacatacatattgatgaagtacagttttaaatttgtcttctaagtaatcgttcacaatcaaatataccaagttctatttcttctaagatacttttaagtttgttgttgaaaattttaggtgtttctacaagttgtgatctaagactccatacattcattaattttgtttcagaatatttatttatttaatgccccagctagagcaacattctagtacacctaggtggttggacctgatatgttgtgtaaaagtaagttatcataaaagatgcgtagtgaaagaaggttgcatttcagcattgatctgtgaactccaaacagtacattgtgcacaaataatagtactgccagacaactgatggttgccattcaagaggcagcaaaagaaaatgagcaacggaattagtgtccaaaatattgaacttaccgctgtccatggtttgaacttttccaggaaccatgggaatatgggcaaaaggaactgctcagatgcaacccgttccatgcaaaccggccagatcttctcaacagcataattcaaccacctgacagtctctgcatcagagagaagctgatccagaaataaatgagcttaatctagggaaattaggttctgtagttgacatgatagctgaagactattaaaaacaagtacatttagattgttctgcagcaaatttgaatggtagcctacaaatgctgttaaataaacagagtatgcctacccttctttggtttgcacatttcctttcctcatgttgtattcgctttcgcagcctcattgtgtatcgttcattcacctggtttgcaatatatgaaaaatctatcattctacatgtgttataagataccaaaaaaaaaagaatgacaaaaactctagagattgaaccctgggcagtgagttctgtaaaaacagagattacagagttcaatatttttttatcagaaatcttcccaatccatatgactacaatgtatttcttctgttcaccatgtttaaagggttgtcgtttcaattttgctaatgaaatataatttttcctgggcatgaagatttgaagacacaaaatgaaattcaaatgttgcaatgttttcaaaatttagacaaaatgcaagtacgtagcacaaccgtttagtagacctacaaagtttaatttcaaattcattcctgatgtcaagagcaacaaaaaacagaacgggtgcatgttgtgcaagatgaaccgtacaacaagactaagtgattatattcttcttttgtttcttgtcatctatgatcaacgtgagatagaatttgtcttgacttaaatatatggatactacatccatgagttcttgaaaaaaaaggtttacaatcttaactttaaagaaagcagcatggcgttttttttccttgaacaccacagtggcgtattcaaaaagaagaacacggctactcctaagcaccaaaacaattcatatttgctgttaaaatttgactgaggaaagccacacattcaaaaagggggccttgttatcccaataaagaaaaaggtaaaaagcacgacaaacaaccatcgtaactactccatgctgtgcaactgttccactaagatgtactgatctgtgaaccctgaattcagtgtcagcgactcagcatcaggcaatccagaataagctgtgtgatcatagacaaaaactttattaaccacaccaatcccaccatcccaatgagttcaccatttgcaagcaaagctgttgctgacgtaggctagcagaccacagatcaccaattatcacacaggaagggggaaaaaattccttggcatctactcctacctggccactttggctgaatcaaggtgaggtacagactccattgttgaccagttttttttatcaagctgaaacatcagcctacgtcatacttgatgcgatgcgtcctgatgcgatgcatcatatcataaatgaattgatgggaatttaaggataaaaatgatccacagatgatggcttgccagctacttgctttaatcaaaaccatcaaaaatactctacaattttccatgaaatgtaaaagttatcgtgcaacagcgacggaggaggagaagtaaaatcagttgatggcgcaccaattaccaaacagggagtggaaaaaagaactagacaagaaattctagctctgatcgggaacgcaccaatgcagctcagcggaggagaacaacgcaaggagggaagtagtactcacctcctccatccatccatccacaaacccatcccaaaatcgggccctcaccccggccacaacaaatcccaacacgggattccatttccagctcccgttaatctcagaacatgcggaatcgaatcgaaccgtgggagagggagaaggagagggagagaggactcaccgcgaacagatagaggagcgcggcgaggaagatcgccgggtgcgcccacccggccgacacggcggcccagagcgcgagcagcaccagcgccgcgtggtgcaccaccgtcacctccgttatgtccatcgcggcggccgccaccacccagcctcctcctcctcgtcctcctcctccaccagcaaactctctagtagcgcagtagtactccacgccaggcagagggaaggggaagagacaagccgcgatcgatgggcaggggcggctgcggcggccgaggcttttttttttttagaaaaaaaaaactagagacggcggcgcggcgagcgagggtgtgtggggggctcacgcacgtagacgtaggagtacgcgcgcgccgaggcggggaagatatggtggatgtctcacggcctactacgtgccggagtggtcggcggcgcgggggacgtggcgggcgggcggggtccgccgcggccgcgtggcgcgccgcggctgctgctgcggtggcgacgtgtgatttcggctctcgcgacgggatccgcgcgtgcgggttttggagggagggggaggggttggccggtggctcggtagccgcggtaggtgtggaattgttgcgtcgggggtttacctccccggctaagcatcgacgccgattcgccggatcgcgggttggggttttttattttgttgcccatttgggggcggagaggatgggagagagacagtagaggtggccgaaatagttggacctgtaattcaacgcgcagccgaggaattggaattggaattggccaaatggacaccgacgtaccatggttgaatttggactttggactgacaagggatgtgtttgggcttgttttcttatatgttgatgttcagtggttctccttctctccaacatggtgtcctactcgcagaggcgatgagtggtttctttatggtactcgtgttggtgtgagagcaaagtaagaggccgccacataggattgtatcaaagattgtaagagggctagcaaatcacagtattgcgtactcctcaactcctgtaacccgtctgtggtcccgctccatacggcagaagatggttaagtactaactgccaccagtaggccctcattcgatacgatttgggaatgttcggccgttcggagccttgcccttgtccacggaccacggatggtggcccggcatacatggtcagacgcttacggttcgtgtgagtgaccggaggatcctactgggcgatcgatcgccggaagatggggtagcgatcaatccccctcccccctccatctctccacctgattttcttttttttttaagcactgtaatactttcctattttagtaaatttatgcacctaaagtttgtatatctaaagtttacacatctaaagtttagagacccaaagtttataagttaaaagtttatatatccgattcaaatttgaatttgaattcaaatattttttatatatagtatttctatacatctaaagtttatacacctaaagtttatagacccaaagtttataagtcaaaagtttacatacccgtttcaaatttgaattttaattatatctgatttgaatttgaattcaaatatttttttatatagtatttctatacatctaaagtttatataagtcaaaagtttatatacccgtttcaaatttgaatttgaattatatccgatttaaatttgaatttgaattcaaatattttatatatatagtatttctatacatctaaagtttatacgcctaaagtttatagatccaaagtttataagccaaaagtttacatagccgattcaaatttgaatttaaatttaaattttttatatatagtatttctatacataaatttttctaactttttgtttttttaaaaaaaatttgcggtgtactatagtagaaagagaataagaggagaaggaaggaggagaggagggaggagtgtatctgagtataggggaggagtaaagggtgatcgttgggcggacgggggagcgatcacccgcccattagcatttccggagtgaccatgtgcatgggtagagatttgacgatactagacgcgccagatatacgggtggaatggaagcatacatgggccatgcgagatcacctaatttccgtttggaccttccacgggcattcctcctctctggttgctgggtcaacggatgtggttgcctgtgacgcacgacggaggtaccagttctaaccgtcacgttttccaactcttcattctcagcgctttcccttccatcctggcatcctgctcagctgggagtatcattttctttaaaaaaaatctatctatctattatactaaaaagtccatgaaactcgccacgtggcacttctacaaacgcttctagaccaccacgtggtaatgtctaatctccctgtcgatttttatttaaatcggtggacccgataatttggaccattagattagatgtattttatttaaaaagaaactaataccttactactattcaccggaaaaagaaaacaaaactgattttagtcctccccttaccccgcgcggacatatgcatccatcccgtatatacgtatatacaggtaacgtacatacgtaagaatagaaaacaatgaatctattacctactgtttatatcgaaagaaaaaaaactatgcacagacttactataaaaacaacaaagcaaaaaaaacaaaacaacaaagcaaaaaaaaacatacgtgcttagtaccactaaaaaattgattatctttaaaatagagttttataatatttaaagataaaatctattactctataaatttaagcaaatatcaccgtcgatttttaattaaattggtgaaccaataatttagaccattagattagatgtattttattttaaaaactaataacttgttactctgtgtccgtatacgggagatccatataacaattaggctagaaaaagaaaaagagcataagtagtctgtaagtacatacgacttggaaaaagaaataaagcttaaccactatccatcgaaagttcggaacaaagaaaaatctatgcacggtggtctgttgaaatagtattttcaaaatcctttactataaaaaaaaaggtgtatcattcgaaaaagatggatggtcttttgaaatagtattatctactatttaaagataaatatattactctacaaatcattgttaaactaaatctatattataaatataaaatatcccatcaatgatatttgttcgttcaatcttaacatacgaggctgatatcacttgacaaatatataatgctaatttaaatttacatttgtaaaaatgaaaacaacacaatttagttgtttcattttacaccgttagattaattgtttctcctatatacggatatatgagaaatatataactgttgactgaaaaagtactccgtatgtacatatggttgaaaaaaacaataatgcttacatattgtttgccggaagaatataaaatgtacttatgataaagcccaaaaaaaatcagcactccttaaaaatagttttctacaatttaaggataaaaaatataataatcttgaaatttacgcaaatgtaaatacaaaatatccaatcaatgcttttaagcgttctatctttaaaattattttaaaattttatatccaatttgtgatccggtcgtattcctttatataaataaactactaatatatatagccctaaatacatcacaaatatggagctgacttgtaataattaatgttatgataataatttcacatcatattttaggtgtgaaaaacacttgacaaatatacaacactaatttaaatgtatatatgtattctccaaattactaaaggtgtcttatgtgattagaaacaataggtgtggaaaacaaaccggacactgaacgaacatgcactacagtatagatatttgtcaaaatatgatacgatactttggagattatcgtggtggtacttagaaaatcactatcttggttaggtataaattcttctattattttaggataaaatttaactccttccatttatgtgacaaaggggaatataagtaatataagtctatctttgattacatgaagtagtatcattagttatattattaatagaaaatatatttcattaatatataataaaattaaaatgttacttaaagtcatctataccatacaaaacaaaaaatgttatataaagtttggaaactccaaaattttttaaaaaagaatcacacacaatataaatagatatgaactaactccaatattgggacatattttatctcataaatttgaggatatagaggttcaaataatacgcccaacagttattaacgaatatacgtttaaaatagagtaaaaaatatttcaaaaatatcatacacacataaatgtttgtaataataaaatttcaaacaacattaaacaaaatacccgcgcgtatacgcgggctaccttcttaataataatcggatgctaatctatctgtgaacatgttgtgccctcgatcaagacacgtgggaacttgatgagtaacaagtactaacaactactgaaaaattttatttatgatagtttaatctgtatatgatttcacaggaaacaagctaggtccgtaaatttgttctgcgagaagaattatgcaaataaaagcatcgaattaggtcattagtagtttatcgagaaggatacaacactagataattaagttaccttcagagttcagacgttgatcgttttttttttcaaactcttgattgttgtgaacagagttcattcaagtgttctacacaatctaaagccaacttctaacagagaaaaaaaatgcttaagtatgcaagagacagtaataaaaagggagaagtccgaattactctcctagagtataaattacttccctaaactacaaaacaagatattttcaccctcaaccattaatactggatgaattacctctcttgactcaattcagagcggttttgtcctacgtggcgtctacatgacagaccaatccaataataataataataataataataataataataataataataataaggcaacctcacccatctctcttttctctctctgttgaggcaggcaaagtgaggcgaggcggacgacattgcggccttgaggggcgtcgagcttggcggcgggcgtgagggtactgcggcgccacggggggaaggggaacagctgccgggacaggagctgggaggcggcgatagagatggacctcggcgtggcagctggccatcgccacagacaacaccaccagcacctgcacgggcctgagtcaccgccagcgccactccctctcccctcttcctttcttcctcgttctagcagtcgacaggcgacggtgtgatggagtagacggcaggggggaggctggctctccgtgcgaagggaaaggcgcgcagcggcatcggtggtgaaggagatgacgaggctgaagcgactgacgcaaatgggcgcgatgccaagttgccttcgtcatcgtcgccgcccaccaccgccactccgagttgcctctcccatccctgcacgtcgccgccgtcctcggctccccctccgtcgtcccttgcctgcctccgtcgtcctcgcccgttgccgccgtccttagctccccctccgccgttcccgctcgccgttaccgctccgcgcgagttccctcccccgtccttgcccgccaccgctttgatttgcctctcctgtccccgcccatcgccaccgtcctcgactccctcgccgctgtccccgcccgccgccgctgtcctcggctccttctttgccatccccgcttgccgccaccgctctgagttgcctcccccgtccccgcccgccgccgccgtcctgggctccccctcaaccgtcccctcccgccaccgctgctccgagtcgcctccccgcggccgccatcctcggcttcctctccgccgactgcttagtgatagatagagagagggagagccgagaatagaagagagagaggattaggaaagagagagagacagagaggtgaggggaaaaagagagaggatgagactgataggtgggacccatcgatttaaaaaaagaagaattgctaaaccactccggtttgagttaagggggtttttcatctagaactgatagttaagagtgaaagatgtctggtttttgggtctgaggaggtaattcgtactcacgcaatagttcagtggtgtaattcggacttttccctaataaaaatagatttatcgaggagtgagcgtaacttaactgattaggctactggaggtgaaacttgtctatccggattcaaattttagatttgacacggtgctcatatttatggctaattattcttttaagtgatgcatttgtgataacttcgttaatctcaagatatattcaaagatgatgtgtgtttataaaagcgagtgtgggtacatatatgagggcttcatttttctctactaatatcagcctcttctcttttctctttagattctaatatttgttcttctcttctttctttttaatatttgttattaatgttactgaatttttcctatgtaagtctccaatacccactttaaaatggggaatttaactatttgccacttttacatttgacaattaaccaaatacccttcttaagattgtacttaagaatttgccattagagagagaagcttttgtaactttttgccactttttgccctgtggagtgccacatgtgcatgccaacatggaccaacgtgaaaaatgaccaacctaccccttctagctagtggtaagtttctcagttgctaagcctgtccgcattgaatcttagtcataattcattcactggaaagataccaagagaaaccagcaacctgcccaatcttcccattttacccttttaaatttataaggcaacaacatcaatggcaccattcatgttacagtcagttcattaactttttgaggcggcattcggatgtcttttttctaacttctactcacacttattaggactgaccggaccggcggttggactggaaaaaaccggaaccagggcctccgccggtctgagttctactccctcattttttttcgcacgtttctttaataactttttaaataaaattaagttactttaaaaatatatattaatctattctttatttattaaaactcaaactaaattagtcatgcgctaattctttgctcagttttacatgaagagagaaatatttccaaaccatgctatcgtacaccttaatcgagctcactccaggtggcaccatcccaacaataccagccaaattggaataccgtttagcagcttgaaaaacgtacacgtgaaaaacgagagagatgagttgtgaaagtgaacaaaagaactcaatctaagtatcgttttgaaagtttgttataaccatctcagtggatctattccttcaaatattgatttgttaactgatgtggaggtactcggtctttaatatagtacctcgtaaaagtgaacagcatccataccgatgcaactgattcgcgaaaacaatttgtccaaatattattcctgactcagcttatattacagacattactaacaagggtagattagtcatttcgtgtgcctggtccatgctggcatgtatatgtggcactgaacagtgcagaaagtggcaaaaaattacaaaagcttctctctccaatggcaaattcttaagtgcaaatctaagaagggtatttggttaattgccaaacctaaaagtggcaaatagttaaatttcccctttaaaatcatcctgtatccacccctaagagcactcacagtgcgccatggcaaatgctgcgcctgggcttggggctggactcaagaacaccaaaagccacttgattcacaatgcaagtgactaaattcacaatgctatctatgccccacgcagcctcggcgccaagaacggatggctaactctagtcacacgcgctaggaattggtgggcccttcctgtcaagtggcgctgatttctctcccccatccaacgtgtgcgttcgaggccgaacgacacctcatcccattgtgaacgccctaacaaacctgcatgtaacacatgatgtacagcttttgcactcttagaataaaatatgcgagaatgctgggaatcagtcgaccggcgggtgagcaaaatcgggcgctccccacccctaacaacgcgcacgtgcctctccctgggccccaccacgtgtccctgcccacttgccacgtgtctccaccacatattccgttgcaacaaatcacccacatattttggaaaccctctattaagggaatttgtttcattttttttgttccaccaaaaatgtttcacctagtgcactcacaatgttttactatgtatagatctacaatgtttcactatgtatagatctaatgttgcagtgaatggaaacattcttttgcaacgaatcagccacatattatagaatccctctattaagagaattcgttttattttttgttccacaaaaaatgtttcacctagtgtacttataatgtttcagtatatatggatcaaatgttgcagtgaattgaaacattcttcgctatttgctgaaacaatgtttttatattaggtgaaacagtgcccgatttaaaagattgaaatattttcgatctacttagtgaaacaatcccaatatacttggtggaacaacatgcaatatttaaaaataattcaataataagctatttttttcatcggaatatattcatgtgtggttttgttttaaaattttaattgcaatgaatttaatggtgcaccgtgcaattggatcatgatttggataaataatttaagagaaaaaaatagttttaattagttttgcatgcatgctgatgatgtcatgctgacgtgggtgtctgatttttcccacccccatcgggcgcccggtgcgtagactcttcctaaaactagagcctagggagtgcccgttggcgcgccgcctgggtggaatgatggtgaagagacagtggatgattaggaaaacatcagatgttgagatgtagatggaggaaagaatgagcaagttttggctaaaaaaaataagaaagcaggcactcatagagaagcaaactgcagctaataagatagacatcttaatacttagtggtctctagtagtaataggcacatatacagatggtctttaacatctgcaaggtagtgcagttctgcagtatggatggtaagcacttatggtcccaatgacgcatatccaatttcatcacttgtcgcacggcacaatgggctcatcttaaattaaatttgaatatatcaatatacttctaatataaaatttaaacaattgaccagaatggtgttaggatctcaagtttttattgtcgagaccgctcatgttcagaattcaggtatgcactactaatttcgtactaacaaatgaatcaactctatgtaattgtcctcccccaccccccaccccccccccccccaaaaaaaaaaaactctatgtaattgtttttcagtactgtataaatcaacatttatgctcacattcttctgaaaaatgtatacccacttcttcaatattatgtccaaacaaagggaaaagaaaaggaccggcttattctcagtctatcctgctgtcaattccttcatcagatgcatgttatgttctcacttccttccaatcttgaccttgcccattgtgatctactgatctgtaaggctgtgagaacctttcaagagacagctattgcctgcacaacatacatatgaactaatttttcattagtttctgagcccgtgaaaattgagtccatctggtcagaaagaggtgctccaaattgcatcatccccttccttcatcttgagtgcgcataagcttgctaactggattgcaaaccactccacactgtacctctaattgttttccaccgaccgcatggttgcctgtttcataaagaaaatgttagcagttggtttggtattatagtgatcttcagaaatggtatagggtatacaaagcaacggaagaaaactgatggtggtgttccattgcgcatatctgtcattgatgcttcaatatttacactgcccaagttatagacaacctcaattttcttaaatggagaacaaccccaaagcatgttgcttgaatgatagaaatctcatctctaattgtcactgttaggcccatatcacttacttcatatatgaagaaaagaatatccttctagcatgcaacgaccatatattcctttctcatacagctaggcagcttgcaatagaacttaataagatgtatgatctgtatggttaataggtaaaacaaagagtttgtgatagacaacacagtccattttaaaaatacccaacccaagaaccagctagtcatgcaaagttgcaaacataatatttatcgttttgtgctctcagtgtatggttgtaaaccatacctgccatttccacaaacacataattcatgaaagagttagccaatgcaaacttgatatctatcttatctgtactctgaaaatgtttagttgcacatctcaagctcaagaattgggtgcactgaaagagatataaaggaacctattattactgaaggcatgtattttttaagggatatattttttacatggtgttcaataacatactttgaccattaatttattccatgttatgctcccaatgaatatgaaattagcatcatatgaaaggacttcaaagtatgaatatcacgagcttgcaaataagcagagtggtagctaaagcgacaacccataaaaagatcaatgttgcagtgctgatcaatttattttcactccttgctgcgaatcatctaaaaacctggactactgtcatattacctgaagatgaattattgcgagctgaataacatggaaaattctggtatgcaatccaaaggtgtcaaacctgacatgaaaaaggaaaatgatcagatcaccagaggctcatcataccataccatcaatcttaagtcaaccaaactcatattatttgcaattgactgaaacctctgcatgaattcattattttcatctcttttccttatggctatcaagaaaccatcactacccattgcagtcccatttaaagtatttaacatttaagaaaacattcagtacagtaaaatggaagattgagatttgcatcttctgaataatagtgccaaatataaagcccttcctgctaccagttgtactaaaaaaaattgactgccaataaccaaaatgctaactactaaaaaaatcatccagtatgtgaagctcctaaatttttccttatgctactttgtaaaactatagtacagagtttctggcaagaaaattggttcccaggtcgtcaactcatgatggatcagcaagcaatatcactgcagtcttatatcttcaaactcccattttccagaaaaaaaaatatagtgtgttaggaactcatggagttgattttgtaagatgcagatgggcaacattcagccgtcatacagtaataaatcgaaagaaactaagatttatgttgttaaagaagataaccttggatgaatcctaattcaatcataacaaagccaagaatcataattcagtcttaatgaagccaagaatcctaattcccagtgtaccttggatatgagattgatgtcaatggaggtgcgagcaacagtcgacatagtagttgaccctagttccgaagcacgcactatattgccaaaaatagaacatagacaaattacttcttcaaattgcagtgaaaattcatgcattattcattcaggggtaaattaccattgattcagagatggcgatcgttgccatttgttcattttagtctatgaatcattgtgttcattttaaactacaagaaccgcatgtggagggagtgaaggggcttgtgcttcagaataattttgatgtgtttcgtgttgaattgaatcttatttaaccctagcagtggcggatcgagcttggacttttgggggctacgaacaaacaaaacaagagaagagtttcatccagatgtagaagagaaggtagggttaatgcaagcaaatttgagacaaagtaggtgtgtgtgagagagatgaatcacagaatcagaaagaggatgtggatgctcaccaggatgcagcaggaccacggcgcccctcccctacccggctgtgctctgcttgccgctgacattcccaccagcttcggcttcttttttggccttggctccagctgcggccactctcacgtcgtcctcctgtggatggactccaacctcgccccgtagatcgttgcgagatgtttccttaacaatagattatatgtgctttctgccttatggagcagaaattataagccagcagacagcaagcaaatataccatgtcaagtaaataaatggatcagttaattgatatcattgacacattcaagaggaccaacttacagggttgtgcatctcttcacttaaaccaaaattttccagaatagaagcaaccaatgtggagaaatagtgtacagcataggagccaacccctacctgaacatcggaatactaatgatatgttatgtaaccagaactaattgcaatttcctgaagagtgtgccaacacaatttataccagaaagctgtgggcatatggaacttaccacagatccataaattgtgaggtaaaataaacttttccttcccattggtaacaatttcatcccctataacgaataataggtcacaccaacaatcaatttgatagaacacatttttccataagcaaaaaaaaaatcctagttaaaattgagtcactgaacgttccttatcaaaagaaaatggtattacttcttggtcttcccacacagtttagagttgcctcatggtgtattttacaacaaactaacaaaattacaacaaaaactatcttcgctaattagagcaagagatttctatgtttagactggaaaattctataaataaactcagagtgaggtgtttaataacaaaatacagtaagttaacttaacaatttcatatacttaataataagcttgatggaagttcccaataacaaaatgcagtcagttaacttaacaatgttgtctgctgataagtaatcaattagaccatcatgttatgtagaagactgtcaaaaaaacacagaaaaaaataataataggacattggaaccataaaagtttgaagatacaaacttacaaggggattatgaaacaacacaaatatgcgaaccatacgaaaatccaagtgttgcgctaaaaggaatatgtaaataaaaggactatacacgaaaagaagttcataccaagcacagagattaatcgaaacaaagtgggtacggtctagctattaagagatgttattcaggtaaaaatcatccatctgtatacttcgtaaaacgggaatacttatccttcaaccaaaaaggccgaaaccaccaaatacaaaacaaattttgagacattaccgaaatgcattggttttgaagtgaaaggaaaggcatgttactgcagatttattcacggcaaaagagttgcaactttccaatcacccctccacaaacccactccaaaacccaattctatgactaaaccccaagaaaacctaaaataccaagatgctatcagacgcatcttacagcgaaaaccccaaaccaccccaaaggccctaaaccctatatagaacggcgctacgatccccgtgcaaacgcagcagcagtcccaaatccgcccatggtgcaccaaactgcgggcacgattatacctttgatggaccgccccacgatggtggaatcgaaggccgcggtgtcatcgccagtggagatgatgatgggcgcggcgagcgaggctaggagtaggagcggatttgggaaatcccatgatacacaagcgttacaaataaataatgatttacacagtacagcaagcagtgcaatggtttctacaaatataaccggattttaatttcataggcaaatgaaagacaagcataaattctacaatgtcagataattcaaattgtattgtcatgctccactaagtaatgattttaatggaagaatgttgaaaaaaaagtaataagatttctgccagaaaacataagtttcagttcagtacaaaccacccataccaagagaatagcaccagttttgaatgatccaagtgatagcatctcaattccctgtaagataaagagaatcagtaggtttatctccaagaagtttgggaggaaaacagaacatatttgtgaagctcttgaaccatagtcatttcaataatgcacattaaccttatatctcaagataagacaagagcatactgaatgcagaaagcaatccccaaaacattgtttgctagccaatgcttcttcgcagaataccatatgcaaaagaaaaatcctgggatcgatgtaacaacttgagacttggtaaactccactaagagcgctgaaataagaaattaatgaacttaaaaaggccaccaagatagcttgtaacatgattcataattgcagcaacaatctgacatatgatacacaattgcaccgatgattgagcattttaaaaaaaaagaagtttgggtcctacagacatacagtggaaaaaatgcagcacgctgaatgatgacattatcattccattcttttggaagaaatcatttcatggaaggcagcaatgttgcactgcatcagaaaaaagaagcacataaacaatcttaattgcacaaatacaatattacgtagttacatgaatggaaaagctactgtatcatccaacctgcaagcttttgtgtacatcattgatttattttcctaatgatctgcaacagcaacagtgaaaaaaatgattatagagatttggtgggggcaattagatgagatgaaggaaggggatattagatataaggatgtaccgtgaataatggcactactggaactcgccttcgatttagcacaacactaatgaggtaaattagaacatggacaaccagacaactaccctacccctgcatcagaaatatgaagctgcacagatgagcttttatctcagctgtcataagcagtgaagaaaatcaagcaaaacttgtaattgtaccaacgagtgagatggacagatggttgcacctcattaaaaataaaaaggcccaaacctcctgtcccacctgatgctggcctcctcctttgttccccatcacatcgctccagccgctgctgccatctctcccgcgcaacatggtcagaaatccggccaccctcactgcatgcaaaattgaagctcatcagaaatgactctgtgcaacaaagaacaaccaagcaactcctctgagcacggtcttgccacctcttaattatcagtgcatagtgatgtaaacacattcatgaaacaaaaaaaattatccacagccagagaaacaagcaacctttgatcgtgcgaacacgataaaggatcagtcattttgtgcagctccattatcctcatatactgtgaataatagaatccatacaaactgggatcgtgctgcatcagtaaagaatcggggatgagaggagatttcttcctgtaactcaccgagatggccactgggaagagccttggggatggggcttggacgccgccagccacctgcctcatgaccgctacgagcagcggaagcagcaggtcgaggaactgccaccaaggttgagcggccattgctgtcgccgattgaaccggtaattttttctctgttgtgaaagggatgaacaccgcggcaaagacaaggggaaggaggatctgagacccttagcctccctgttgtggccgattcgtccccttgtcatcgttgacaatggtggcaagctgctcaaggagagctcgattctgtgtccgctagatcaaccacaagcaaaagtcagtattgcttgagatcacaacacacaatcatcacagctgcacaccttggcccttggggcgaggcggcccatgagagtggcggtggcattgccggcattgttctcctcaatgaaactgattgtggagttcattatgagcagtgtgatgatgcccacgaagtcctgccagcccggcagcttccctgaaaacaccaaacaaatcaaccctcgtcaattcaatcaaacctctcacaatccctcacatgccatgctctggaacatcatgattcattaaattcattactacttactactccattggcgagagcgatggccatgatcgccgcggcctccatgacccaggacagcgggttcgacatgaaccccaagaacctcaagaacttgctttcctgcacacacacacacacaaacaaacatgaaaaaaaaactctgcaccatcgaatcgattcctaaacagaacaagaaacttttctctactaaatcttgggagagagactacggattgggtgggtcaccttcttctccttgagcttgttggggccgaagaggttgaggcactgctcggcattggcggaggtgagccagccggagacggcgatcgacagcgacgacagcagcggcagcgcgaggcggaggcggccgggtagagcaggaggtggcaccgcgatggggaggcggcggcggcgtcggcatcggcgtcggcgggggtggagaggagtgttcgcctcctcgctttctccatgttcacctcgaagcccacgctcggcggaaaggcgtcggagcgaggggaaggcagaggtgaaggcactcggagacggcgacacgacggcggcgtcggtggaggtggaagcggcggcgcgagggcgaggcagatgtggacgcggtggcgcgaggcgaaggcggaagtggcggcgctcggcggcgacggcgacgacggtggcggaggaggggaggcgggcgacagcggctagggttaggggtgagtggaccggcggcggaggaggaggatggctgagggagagggaggaggggcggcggcggcgttcggcggcggtgcgagggggaggcggtggcggcgcgaggcaaggcaggagagggagtgagcgagacgggagcggcgccggggaggggatgcaggcggcggcggctagggtctgggttagtgcgggcagtttagcgaaaaaaaccctcgagttttaagttttacagcgcggtcctaacgcgcgtactttccttacttataatgtaataatcgtctttttgaagggactctacggaaaataacaccccacaagtactattcacgggggactgcggacgaattacgcgtgaaccggagggctttttcgcaaaaagaccaccccgcacaccgaacatactgtagcgaaatcctgacgtggcacccctcctcgcccgccccttgcgcccccttaatgtactccgatatgtgcatcatttgaattactagtaaacgtgcacgtgcaacgcacgtcgacatatattgaaggattaaattgaagaacataatcaatcaaaattcatttgagttatgttatttcataaatttcaaaaataagcaaaacataacaccgtaatatgcctatgctaaagcacaagcacaactcttgtttactaatgataatttatgtctcaagcgcatatcagacaatgcctatgatatggaagcaaatatatgttgcgaatgatttacgtgtacacttgatttactcatgtattgcactatcaattgttactcacaaataaccagtagaattaagtagagtgacaatcagttgtatcaaagaaacttaaaagactttcgaaaaatgcattttgtgttcattaaaagctaaatacttggagttcctcatggaggctgatcaccacaggtatagggagcaacaaaagtgatcaagaaatctatcaagctatatgtgcctttacttgcttgtcaaaatcatcatcacaacacattaaactttctggttcaggatgagaacacatttagctagccatgtcttcatcagtctaatacaaatacaaaccatcagccttggaaaataatacaaatcatcaaacatccttcatctacacgaacaaaagacagctcgatgccttgatctcttagttttgaattacagtaatcattacaagttagactgaaatgtaagtcaaaaaagcatcataggagagtttggattcatatgactgagttttgagttttaggtcaaaataaaatggagaaaaaactaccatattgactacggtattgcaaaaaatgcattcttaatacctattatcagcaagatacgtgatgggagccaccatgaaaagggctaagtgcatatgcaacatatatacttaatgcatgttccacgttccttggtaaaaatacctttcttgtgtttctgtttagtatctagctatctaccacctaaaagcgtccagaatacataatggacagaagaacaatgtcaatttaatttctagacaaaaaccaaggacaccaaaaaggatcttacaaatgtaaaacgtcgaggaactaatgtgaatgtgaagaatgtaactaataacatcaattatcaactttttccaaaattccaaacacgatataactgataaccaatttacttgatgccagccacacatcaagaccatgaccagttgatggtgttcatttgtgctacgaattatgtaataaaaccgtctcaaataatcaaatatgttaggctaaccagttggtgatgtgcccattaggtagttcactattaaaagtggttattcactgaatgaatgcttgtgcgtcttttggtgaatgggagtaatcatttttctcatcctgatgctagaaaaacagtggtttgaacttcatgcataattgtctgatgtggaggttggacaatttcaccttgaaggtttcctgaaacttcatatttcagagaacatatttcttcaatgggaaaaaaaagaaagaggaaaaaggactgcattctgcactacgcgctcaaattagtaatattacaaaggttgttcaaacatacataaaagtatggtagcatgtcatgttaatgtaagataaaagctacaacatgtagaaatataacacctctttgttgacatcagcagcaagacaatttacccgagcttgttgatgatattggtgtggaggccctaatagtgatgtccattgtaggtgcctggtagtgaagcaacggttgtttggagcaaatatcaacggctgtttggagcaaatattcatagagcatctcaacaaatatatggtgagctttttaacaaacaaacaatagccacgctgttgtacaaaagagtgaaaggagagaaccatggtgcaggcagagcattggaaggagaacataaacacatataacatttcaattattttgaattggaggaaaataatttgaagcgtggcaattaatctcatgttaactgttataggcatatgtgtgctgactgcacgtgaattccatgggtagctgtagatcacactttgctaatgtgtagagtatgtgctaaactataggagaagttggatttcaaattttgccaacttttcgaatagaggtctagaattcacattgcctaggttctagatacagagctctagaattcataggatttgaaaacaccaatatgatgcaaaaatataatgtagattgtatagtcaaacacatttcaaaattactataggatcgtctaaacaggatgtcagttgacatgaacaatttcacagattgtgctaactttacaatatcgcaacaagaaacaatcgagtttttgaaggcaaattctgaagccaccagtctaaaactatggagttttggtggtaatagtgctgacggaacatggtctaataataagttaagatagcagcaatttgtaaacatgagtaatatcaaaagtggttaagaataaatacatggaaatggctaagaatttgtgtttcatcatgtacaaagacagtagtttgtaaacatgacaaaatacggaagcaagcagctaggtacggggggaacataaagaaaatatgagactttttcacagtttacagcacgcattgtagcactttgtccaacttataaaggacagcatgcaaaatccagcttggggttgcgatgagtccatccaaggtaaaaaaattctggcagcaatccaatccaaggaagaaaaaaaatctaggagcaaaagaggactcttgtcagaaaggcaatagtgtttggactattcattcattccaattgcaatttaagttgtaccagtcagcaagtcaaaagatgttgtgcatattcatatcatctcagatcgcaccgcatgaaactgtaatgcatcagatatagaaaaccaaaattattcacagtgcaattcttaaagaatgtaaactaaagaatgaactgaaaagagacgatatcgtctcaaattcatctgggacctgactgaacaaccaaacaatgtttttgcctcaattaaaagagtaccctctccttcaccttgatctgcagatcaacttgtttcatcaatatatattcactcttgataacatgcctgaagacatgaataatttcctagtcagtcttacgttagacacagatgtagctatgcaagactgattttgtaaaaaaaaaattacacatgccaaattggcaaggttaaagaccagagaagaaattgagtagtataagtacacattttttttaatttctttaatagccatttttaaaaatgaaattataatattagcaaacatcatttccttctattcgaaagcagggtaatcaaagaacaatattccacaaaaacaaaaaagggtgataaatatgaaggaactgccatatatatgatttttcgaaatcttagctgattcaggtaattaccttagctaagatatggtagtgtttaagttgctaagagagaagatgcatgatttattgaagtagctgcccttgatcttgaacatatccatctgcatcttcagctcgataattgaagatctctccatggaagaagagcatatcgcctgcattcgtgatgtccccttaaatactttacatctatggtgaattctaaatacctaaaaaatgggagatgcaaataggtcacaatgtcggtagctttatgtcacctgaaagcaagtgaacaaccaaattaaagggtgtgaactgattatcttagaccatccctccctcaacggcaattcatcaacaccccgcagggcacaatacactcatagtagattcttcacacgtatgtacataaaagaatttacttcattggttgattgttcaagttacaatcaaatagaaccaagaaaaggagtaaaccgaatagtagaaattgaacgaaccgctgtttccaaatgctagatatggaggtccctcgtggcggtgaccaggaagtcgtcgggcgtggcggactgacgacgattccacagctcagggagagccgggatgagcgatgagtccatgcacctcgccgaagagaggtctggggagggcggtgaggttgatctccgcatgcacgtacggtgatggtggacggtgatgcagcgacgaaggggaagagcggggaagtggccaacggcgaccccacgctctccggcctctgatgccggcagcgcaagcacgcgaggaggcgggacaaagggtagggcgagcggtgaagagggagaaaatggcagcggtacagtggaggccgtcgacggcggcgagagacgtaatggaggtctcgttgggagcagtcggggtggagaaaagcattgttctttttccctttttgttaaccgacgctaattttacacgaagtggagcgggaggacgcggatcgctaattgctggggtgatccaacttttgatataagccattggatgaatagatctaagggttaggaaagacaggtatttgatgaactcgtactttttatattagtctatatttagaagataaaataacatgctaagtagcctacatcttaaaagctgtctgaccgcacgctcttacaatttttccaaaatacaaatagcaataaaagcctatgaattttgatataccatgtaactaatttggaatacctaattacgaaattataattataagatgtgtctcatccacataaaactttttatattttaggacggagggagtagatggtacgagaagaacctcaggttcgggtcggttttctccctgaaaacgggtccggacatgggctggttgcgggcccaataacataacagcacaaatcttgataccagattggacggtctaaattttgagtgcaaaccaacaagaaaacacactggtgtcaaataggcaaatagcaaataccaaaaggaataaatcacttacggacatcacatgcctaatgatccgttgtcatatcatatgttattatgcttaattcatgcctccatcattaaacagcttgacgaacttgcttacttgcaactgacaaatgtcgatctctcaacgtcgtggactcaaaggcccaagttattgggcacactgaagcagaaaaagtccacttcacatccctcaattatgatgacaagtactctacgtttcatattgtaagacattttggactcaccgattcatccaatgatcaatatatatactttgcatttgtctctagatttattaacatctatataaatttaagaaatgctatgaagtcttacattgtagaacggaggaagtaggtgttaaccaagaacgaagatcaagtcaacacactatgtagacataatattggacaaaaaggtagtacgctgagggatttcatttatactggttttgagttttaaaagatgctctataactgattttgtggttgaggaaagtgagaaactcgatctgcagttaaggaaaataaaatagacttttcccacggaagctccggcatcggtggaccatgaacggccttcctactaatggcctaaaaaagttataaaggcccagctataaaaaggttacgggcccaactattgcaatttcatcattgccactgggaaaaagttcactttgactcccttaaaaaagtaggccgaacctaattcgtacccctcaaccagaaaattggataggatgactccccggcttattgaaaccagtacaatttgactctcccagcggttttggagggtggttttgctaacgtggtggtgttgacctagtcttagtcccacgtggcacttatgtggcattagaattaaaaaaatatcagtgggacccatatgtcattaacacacaaaatatattgtgggacccacatgtcatcccctctctctccaactcttcttcccttctccccttctcatctggcggcaccttccccactctctctcctggcggcggtgcggaggcagggtgaggagatctggaggcggcgcgaaggccgggtgaggtagcggcggtggtggcattgaagaggcttgtcagaccctctccctctcggcggccatggacggcgaggcggtggggttctcgccttctcggcctcttccgccccggcgctggcaatggcggcatccggcgggcggcaacaagggcatggcggcgagggtgtcggttgcagccgctgggcccatctccttcgtcgtcctcctcctcgtcgaccaccccgccgccggctccaacatctctgccccaccacgcgccgtcccctcggcaacgcagtgcgccgtctgctcgcgtcggcgctgggctttttcgtccccgtcgtctccaggaggatggcctctcgccctctcgccggagaccggaggggacgatgtcgccgaccagggcccgtcctttgcctgtgcgccggtcatcctccgtgagctcacctcgacgacctccccgccgaccgcctctccaccaccggccagcctcttcttggccgccgccgcaggagggccctatgccgatctggtgggccgctgccgcccaccacgccaccggaccccatcgcctcctcctccaccgcccggtgccctccgtcggcactgccgttgcccggggaatccgtttccgccgcccccaggggggacaactgcctcttcaccactgccgccgatgctctggactccgccacccgcccctctccctcatcatgctgctgatcgccgccccacaatttttatttttttctcttgtgacttacatgtgggccccatgtttatttttaatttgtctgatgagtggactgccacgtggatgccacgtcagcgaaaaccactcttaaaatagctgagggagtcgttttagacggttttaatagttggaggagtcgtcatatctggtttcgtggattagggatacaaattagattcgacgtatatttaagggagtcagattgtactttttccttgccactgccacgtgccagctgaacatggagatggagtcatggacagctagttactggaggtgtgcccacgaagtgcgaatacggccatggccaacgctccacgctggagcgtggttttactcctccctaggggtatatttgcgccagctcggccgggaccgctccctcacatagtaccacgaccccttgcagagcatcaaatagtttcgtcaggttttggcgaggaactggcgagaaactgcgttgggggagaggcgttgtcccgtgtcgtagccccgggaccttgcggccaactacctctgatgccaatggcgaagatggcgaggagctaggtcggggagaagaagatggccccgatcctgatgccgccgccacctcgatccgctaccaccaccgttcaatctgtcgcgtccgctgctcgatccggcgacgctgcctcaatccaccacctccgctgctcaatccgccattgccgcctcaatctggcaccggggagcggggaggggagaggcagcgccgctagggaagggagatgcgaagagagaggaggtgcagggagagattgggaggggagaggaggggttaatgtttatatatatttgtgatatttaggggtatatatgtttgtgacttatttttattttttttaaataagacggacggtcaaactttggactagaaacccataagtgtacttaaaatgagatggaggaagtagtaaataccaaattcatgtccacttacattcaaaagacacctcttcactagaataataataaaaaaagacctgttcaccgcttcttaacgtgatgtgtccagcgttttagagtaaattgcacccaaggtgtatcaacttagtatgtgggtacaatttggtgcaagaacttgagaaatgtgcgttctaatacaataacttggcaggtaagtgcaatttagtataaaaactttataagtgatcgtataaatacaataacaataacttgcaaggttggtatgatttatgcgacaacttaattatttggagccctttttatatagattcaaccttttgacaatatactaatgtggatttgtataagcagtaattatatttttatcataataactaataattgaaagtcaattaaaatggatgtagaaattattatatttcggttgatatttgaaaagataaagaaaacaaaaaattcttaaaggtaattggatgtaaattttatgtgcagtataattcttcaagattaaatttaatattataaggtaatatccgtaggatttctatgtaatggcatattggcatcataaaaataacttacctagcatatacttagtcaagttgatataccaaaatactaaattgttaaattgttaagttcttgtactagagcgcacccacttgttaagttgttacacttagacattcaattcttaagttctcgcactatatcacaccgacttgcaaagttgtaccataggtgtaattaaacacgataagacatgtatacgctgtgagtttttacaaaacaaggaaagctttctaaaatgcttttttttaatgaaaaaaatatgatgctattgactttcaaaggtatgcgcggatatggaagacaaagcggcaaaatgaagtctctaatctcactatttttagttatgaaccttcatggatgagaatatacttttttttttaattttaaatgcataaaaaaccctaaaaatattctaaatattaggatattcacatttttaaattttcaatgggatgagagtcatccattttttttaattttaagtgcatcaagaagccctaaaaatattctaaattctaaatattactagcatattcaaaccatggtcacacatacgtcactagatagaagtttatgattcttcaagtgatatgtgcatgcatgccatatgtggatttgaaactaagatctctcaacacatacaaaccaatcttaccagctcacctatagaccatataggtgatcacatgttattgttttaactattcatgttcaaatatgaaactctagatgatttcaaatgagaatgctttcaactacaaaattgcagatctcatcgagctctacaactttagtttagggtatgtctccatccatggtccaaaggtcatttgacaaattcaaaaaatattttggaaatagagcacatcacctataacaaaattcggggatgaaaacaatcttacatgaaaatattgtcaattagaaagttgtagatctcatcaaacactttgacttttacataggccatgtctccatccgagatcatttgaaaaattaaaatcacatttttcaaaatagatctcaccacttataaaatattcggacatgtaaactatctcaagttcaaatattgtcagttttgaagttacatatctcattgagatctacaactttcatataggatatgtctcaatgtgagattatttgaaaatttcaaaagattgaatttttcgttatccatgacggttcgtaactatcacccttcacggataacattatctgtgtgaagggtagtaattaagacccgtcatggatgagtgctctcatctttgacgggtcatctcattacatccgtcacggatgacggatgacatattatccatgacgggacatggttgtgatccgttataggttatccgtgatgtgttagaattacaatctgtcaaagatgaccttatatcggtgacgagtcatccctggtagtcatatcttaaacgtaatactaccttttgaattgttagagatgagtcatctggaataagtcgcattagcaagatatggatggtttctttaacactaaatagtttcactaaaaccaaaatgtaatatattttcataatacgtttgttttaagttcaaattattgtattatatttctttatataaacttgatcaaacttaaagaaatttgattaaaaactaaagtcaaattaacttataatatgaaacagacacggtagtacggtttcttaagaaaaaaacataatattaattagttgcttcagttttttttcctcaaaaagatggaaggaatatgagcataattagtgatactagaattaattactgtgcgcactgccggttatttttccccttcttatataaatacacccacgctttccgccgtttccattctacccaaacaccacgctggatcgcctccattcaccgcaacacgcgtgtgttttttgatcgattcaattcctcgcgtcgcgcgacatggcgccgccggagagcagccaccaccatctcctggagagtggcctgcttgaagtcagcaaggcaccgtcggcggcggtggctgccgaggaagaggagaagaaggaggcggcggcgtggacaccgtcgtcgtcgtcgtcgatgacggggcggaagatcaagtctgaggcgtcgccgctgctgcggcggctgctggggggcccggcggcgcagctgcaggaggtgctcctgggcacgaagctgtacccgctcttctccgccgtgccgctcgccgtcgccgccgagtccctccgcctcggccgggtacgtgcccctacccaagccaaatcctgaccccagaaacgcgccgtagtaccgtgcagtatttccatacgacctaccgttgcatcaaactgttctcccctcaattcaattcctccattagtactagtgcttcgtactaccccgattgctacgtttcgatttttttttgactgagttgctacgtttcgtttgaggaagtttagtcgcaaataagtccagctcacacgttacaatgacatttctactcaatttctgatcatactaattgagtaattgtctgcctagtttatatcttagcaaagaaaaaataaactactccctccatctacttttgatactcatatttcatcttgacacacagaccaagaataagtagttctacttatcattcatttaagcatgctattagtcattcctcgtaaacaagcgattcattaatatttacatttctcaaagcccatgtagctaatcatgtgtggaagaatggagagtcatgcattaaattcgagaaaatcattaagatgataggttgttggattgaaatatgcctatcaaaaataaaattttcagatttaaaaatatgactattaaaagtagatggagggagtattttcttctcaatatatcggatagaacttctaccattcgttctttaaaaaaaacttagcaaagaccaaagatatgtttcttcttcgcctaatgacatggtttttgaatttaatttaacggcacaattaggaaaattaagccataaaaattgcgggttcatgtccaactcttttattttcttcttccaaataaaagggcttcgtctaaatatgtttaaccttttctgaatgaagcattacatttttttctgactgaatatagcaattcttaacatggtagaaaactggatattaatggctaaaacaacaattaagtagtattacaatagggatgaattaatcacatgtatgcagaaaagtaatagaaaatggatttgaaatgagtgaaatgtgcacatatggcttcatcagattactagcaatgcacaaagaagaagccttgggtttaaattccaggggttaactataactgtggacttgtctagtttgaagtcaatttttacccaccctaaaattatagtactgtagtatcgaaaccttagcaagtttttacactaaaatttatgaattactctcaccttcccaagttgaccatcatatatgtttatgcaccaagactaaggataatttaaatcatatcaatcaagacaccatgcacacattctccaataatatatgtatcgattaaaatgccttagcattcacatattctttcatgctgcattaattgtattttgatgaaatccgtgtccatgcgattatacgacgatcaatttaagtaatttttaattccattatatgatgatcaatttgggaaggagggagtagtatagataaaaattaatagaaaaccaaataaccatttaataatattgaagttaaaaaattagtatggtaaaaattgtatttaatccaaataagccaagcaaaccagagacgcttctcttctcaccggaggttgcgcctggagactgcagagtacacatctggattttggacctactaggctactagtagtcacctactacagaacattcctgcactttattacaagttgcttatacctttcagagttgcaaaattaaaaaaatttcagaatacagccaatagttggacaggacttgcatgtctcttctgtacgcatcatctagtctggttggttagataagttagttagcaccagtgcatagttttgtacgacctaatactaatatggacatactatttgtcatggttctgaaatatttataccaattgcctagggtaggatatgatcagaaaaataggctgaaattttattttgtttcctacatttatttagaaatattaaaaagatgacacggatgaaaatacactaaactacccatgctacacatatctcaattagtcctagccaatacctcccccatccaaggagacaaccaaatcattttacccctctccataatatccgtatcgaaggttaaaatttactactgctttagttttttaatatatgacaccatagacattttaataaatacttgatcattcgtcttatttcaaaagtttatgtaattattatttattttgttgtgacttgatttattatcaaatgttgttttaagcatgacttaaatttttttatatttacccaaaaaatttagataagatgaatggttaaacgtttatcaaaaaattaatgacgtcatatattataaaatagaggaagcatattttagaaccgagggaacaattctttggctatatgttacagctaggatgcaatatatatggcgggggtggttttgctaaaaattgtgagcagttagtgactaaacgctattagttaaacatacagctgagaggctgaacgtaagtaagcaatgcaagttgtgcggtcggcgaggtgatgagagctacgatagtgaaccgaaatttaatcctttgtttagtttgcagcaggataagctaattatagttacttttacatgcgtgtgtatctaattcataagatgtgcatcgacgaattagcaagctaccgatcatttgtttgcttatttttttcaaaaaaagaaaaaacttggcattggtttttatcaggacatgcattcgttgacaaacaagagtcaagttggacaggagttgcaaaaaattacttcatccgttttatattataagactttctagcattgcccatatccatatatatgttaatgaatctagtaatatatgtgtgtctagattcattaacatctatatgaatgtggacaatactagaaagtcttataaactgaaacggagatggtagattatatcatgcatgtgaacatttaggttttgggtacgtttaagaagctacacccactctcatacacaataaacacacgattgaacatgatcagatatatacatcaaatacttccaaactgtgggccggcatatatatggacgttttaagtactagctataggtacaaccaagccactcagcttccaacacattttgggcattttggatttgttgcggtagaaaaataaagagagaccacacaaatttagcagaaaccaacactgaagcccttccagcacacaattcctgtcaaaccaatactattttacgtggttagatgccctttcacctgtactgtctttgtcgtcaatgaccacatcaagatatttaagattttggttgttgccccctttcatagcggagggtcaggagtctggaagagctgctgcgtgcatgcctttacagcgtccgtcggttttaaaatataataataactcagtactccctccattccaaaatataaggcacaaccacctttaaccaaaaaacaattattatcatctcctagtttggacaccctaataatataatgcatgtatccagtagaattagagatttgaggtggaggattttaaaaagtaataatttaatggagaagaggtcatagttaattatatgcatgcatacataacttatattatggaacatcaaaaaaagtagttgtgccttatattatggaatggagggagtacttaattagacatcatttaatactctctccgtttaaaaaaaacctaacctagtatttgaatgggacaaaatctaatacaacgaattatgtagattatgtttcatataagtattaggttgtgttttttttggatggaagaagtaagtataaaactggacagatgattagacactacctagcaatacaaatttattaatttagagggagtatgtacaataaacagacaggcaggtaagcctaggcgagctgtctgtacaggtgtgacttgcacgtacggacctgtgggcaagggattttatttgacaaacgaataggacgttataaatggaaatgcaggtgaaacgctacacgcctacaccttgtcattgtcattgatgcagctgggtctgcataagtgtacaagagctggatccgttgatggggccagtggattcggggtatatattttctgtgggtggtgtttgtgtgcattactactaaaagggtatttttccaaacgatcaaaatcaattttacgtgtggttaagccgcctgtctacccgaaggtgtctcgaaaatcgccattttttcatgtgggtgcttatgtcgtctgcacgcaaaaataaaaaataaaaatagccaaaaatcaaaaccctagtcgtcaccaaaaccgttgatgccgcctgtgcgcctgccgctattgccggatcttcgcgggggatggccgctgccgcgggatccatgcgggggacgtcatcatcgtctcgtccttcgacgtacgtgtggggagggtcggccgtctgtcgctgctgcccattgtgtgcctatcgctgccgccggatccacgtggatccaggcggaggatggccgccaccgccggatctgctcggggaacggccctaccgctgcagtcgttgcctccttcgacgtgtggggcagggccgtccgctgctaccgcccgccgtcatgcgcccttcgaccactgctacctgccgctgactgctcctgggaggggagtcgagggagagaggatagaagtgagctccgggagagaggagtatgaggagagtatgtgagagagagatggaaagaggataaggatgaaacattttaaagtattgggagggaagaggaggtaacttagagtttaggcaaatatttaagaagcacgcctgtgaaaatatattttcgcatgcagcccattaagagttccgcttgtaaaaatatgtttatttttgcatgcggactctcaagaggccagtctgcaaaaatcgatttttacatgcgatcctcttaaggagccgtatgtaaaaatggaaattaatttttgcagacgtgaccagttacgatccgtgtgcaacctaaagagggtctcatccagaaaaatcatttaagagtatagtgttatcttctcttgtatgtgctgtcaatttttccgtcctgttggttcaaataatcttaacttgcgtcttaggcaacataaaagcaaacataatttctgaagttacaatcaagtaaaaggtgtgattagatgcatccttacactgcgtaattagacattttaggaagtgttatttgtgaagtttaaatgtccaaacttataaaatataaacgctaatgcaggaaatatcatattatattggtcaaagtaaagaaaaaactcatttccgttcgtttttgtaatagtctgattaagagttcatcgcttttatctgtaatccattaaatcagcatttttttcgttatctgcgatttaagaatggagataaaccaagcagtgtaaattaaccgagggcgtgatacacctgagtactagaatacgcgtatgcgtttgaccatgactggtcactagtatagttgacaaattaacctttattaacaagtacaagcacatgattagaaatgtcaaagaatatgacttacattaaaatttctccacgtgacgtatgtatgaccacacatgttgtaagtactcttgattcttaacagaataagcttctttcacttgctgctgacagggaaagaaaaatattagagaagcttccttgaagcttcgtcgtagcattttcttcattggtttgtcttcttgtaatttttgtggaaaattaaatgtttgataatttttacggcatctacttgtaatgtaatcaataatttttttatatattttttcatccaatagaccatatatatttatattatcatcttcaattattgatagtacaattaaagagtgtataattgttttctatgatagtagaatgtacaaatcagtggcttggatcacttctatcataaaatattctaatgttgtgcattcacacagttagccggaagagaacttttaaacttgttatggacacaacagtagttccaaccatggataagatctcaccagatttaaatatgatatactctataccttcagagttatacatgcatcgcattatgttttacagtgcatctagtcgttctttatgtttacctgtgctcatatatagtgaaatatgaaggcatattgggatatcatgtaatattgattgcagtagacccgtagtaaaatatttaatactcaattttgaatactagtttccaaaatgttatatattattgagtaaatttcagtttggacacattttattgccaaagtttcgctagatcaccatttaatccacattttttttctgtttggactagttgcttttacctttttgtcattttggaccaccctcaactatcttctaaaatatatcaataaccttgattacaccgactcttgcataacgataaacccctgatgctatatgtaaatcacacattcgacacaggatgatcagttatagttaatggataagagaattgggctggtttaaagtaacattgagataaatttacctagtttaaagtgaatagtttaggtaaagcgtggagcttatgtatggtcgccttgtccacattggacttttgggaaatccatttgagaacttggtggagagagggaaacttcggctagtgtttctatgcgctgcaagaggtcaagggtggaaaggaggacgaacaatagtacttgcccatgaaacccaaataaatctcataagtgtggtttataaatcacgtccaaactaaaactttggtaatagatcatacgcaaaataacaattcatgacaattttctttttgtccaaaacatggtttagtttctgaatagatcaagaaaacaaagcctcttcatcaagatcgatattgcaaaggccttcgacacagttggatggtcctacttacttgatgttcttcgacaattcggcttcggcaatcgctagttacattggatctctaatcttttctccacttcatcgtcccgcgttctcctcaatggcgcacctgagcaacctattcctcacgccaggggacttcattagggtgaccctctatcgccaatgctcttcattctcgctatggagcccttccactagattatcaaagcgactgaaagtgcttccattcttgcttcggttgagggtaaccgtaatagatttcgctgctcgctatatgctgatgatgttgccgtgtttacaaagccagatgcgccagagcttagcactctcctcaagattctaaatctctttgcacaagtgtcaggtctccatacaaatattggcaagatagaaatttatctcataaggtgtgacgaagttgatttaactccattgctccagatattcccgggtatagttatggccttcccttgtcgttatcttggtttacctctccacttccgaaaattgaggaaaatcgattttcttcccctaattgaaaaaattaggcgcgcctcccaacttggaaaggacgttttttctcatcttcagggcgagagactctggtaaaaatagttcttagttcaatgccaatccaccatctttcggccctccaagtaccgaaacgggtgtttaagaggattgatcgatttcagagattgtttctttggaaggaagaggaccctgatcatttgaatcctggaagttgtctggtaaactggcagacagtgtgcagaccaaaatccttgggagggttgggcctccctgatttggaaagattctctagagctcttcgtctccgctagctgtggctcaaatggaaagaggttgataaaccctaggccggcatgaatctaccatgcgatgatattgacaaacggttgtttcaagcagcaactacgattgtaattggcgatggagcaaaaactagtttctggcaagatcattggctgcatggaagttgtcctaaagatgttgcccccctttgttttcaattggcaaaacgaaagcaaagaagtgttcaaccggaaatgtcttcaagcaactggctagtttccttcagacaatttacgatgatcgaggagatccatgaccttgtgcggttgggagggttgcttcaagatttccaattttctcaaaactctgatgacataacttggaattggaactccgtaggctgttactcaagcaaaagtgcgtactcttatcaatttgaaggatctttctctcggttggattttgtctctctctggaaggccccagctgaacctaaagtgaggtctttcggttagcttattctccaccaaagaactctaatggctcaaaatctactccagagacattggccttgcaactggatatgcggactttgcacctgcgcgttcgaggacaccaatgatctgttttgtgaatgcaacttcatcagagaggtttggagtttagtctgtaaatggcataatttggtagtcctcaactcacagccggccgaaacctcctcatggtgggaacaaatcaatcgacaaggctcagagtcccaaaagaaagttgttagaggagctttattaacaacttggtggaatgtttggctagaaaggaataggagaatttttcaaaacatttcttgtacagctgttgaggtcgcttgtcttgttaagcaggatctagacctgcgtaagacggcatttaggcctccctgattttcctatggaacctggaacttttgtccctttgacgggattgtaactgttttttgttttgttttctcctttcaattaaattccggcagctctcctgccgtcgttcctctcaaaaaaaaaactttggtaatagaagatgacccaaactgcaattcattatatattttctttatgaaagggactatattacaagcagtacaacatataaccatgtgaaacaattggaataaataccaggagctctttgtaagaatgaaattgcttggttgccccgagaactggcaacattcaacgttgttgcgtttgcagaatgattctgtatttgaacagtactgatcattagcaattgtaacatgtatggagtgcctacttaacaatgcatgcacattgtttgatgaatttcctaatacaaataatatagaaaagaaatcagttttgcacattattggcatgaaaaaatagaaacgagtaggttaaaatgatacacacacgcttatctttttcacgcatattatcatcataatgtgtttttatcgcattttgatgtcttgtcttttcactaatatatggtgacatattttatcggcaggtttgggtgtttgccttcagcttgataggcctggcaccgcttgcagaacgtgtgagcttcctgagcgagtaatatctcagagtcaattgtgatctgttttgttgtgatttgtatgattatttcgaggttcactcttctgtcactgatcactagcctgatctctgctttttcagacatattgccaatactgtaggaccaacaggtatgtgccatctctaattgttcttgatttttattagttgccgattaaaaatatatattataatattgtcaaaaataaaaaaaaacatatttaccatgaaatgtgttgctgatacttttctacagagaatattcatcctaatttaattttacatggctatccatttagatttgattattttttaatattaataaatttatgagataatttgtaaaaatgggggtaggtgggtagcagattcactgccaccaccactgcttttattaaaggaacataggttatgtagaagatgaaaactatgacgtcaaaccaaattgataaatcatgcggaaacacatgtactcaagctactgatgtacgcacaaacatgtacaaataggacagttgagggattggactattattttaagtcattttttctgaacaaatttaaacttctctcaaaactgatcaatatgcaaatactgtgtattgtaatgcgtgtgttgtcagtattgctagtattaaaaaaaaagaggtcaataagttggtacattggcctaaaatatactactatctccagctgccattggaatttggacttatataaattgaaatgaactcatatttaaagtttactctgatattccttttgacaacttccactgatactgagaattgagaattaggcacttaaaagtgcatggaatacaaacatgttgagcctcacatatatattttgttccaaggactttgtactattctgacatatgcttttccaagtacagatttacagtcttacagtctttaattacttgatagtttcctctaatatggaatttattttattatagctggtgggattatgaatgcaacatgtgggaatgtacctgaattaatcattgcactgttcgctctgcataagaataagatggaaattctcaagtggtcactgttaggttccatcttatcaaatttgttacttgttcttggttcatcactcctctttggagggatcgttaatatcggcaaggagcgtccactagataaggtaagtgtaaaagtgcacatacaggcagtaactataacatatgtaaccgtgttaactttttgtgatcgatctattttaacagagacaagcagatgtaagcataggccttctgttgttgggtgttctttgtcatattgctaccctagtgtctaaatacacaagtagcaccggagatagcataaactcaagctcagttatgcaattatcaagatcatgcgctatagtaatgctaattgcttactttggaagcctcatgttccagttgaaaactcatcgtcaaatatttgagcttgaagaggtacaaaacttacttcactaagtcaagatgctgagtcgatttcacttacttcactaagggctcctttggatgcagggggatgaaacccccgggaaaaagtcccgtacagggattttcccctgcaccaaccaatccccttccaccaccaggggaatcactcctgttagggaaattttccctgctaccatttgagagtagggagagggggttgatgggggaagggggatttagagaggcaaactgctaaacagtgtttgaacaacaaaacatgtctatatgaaatattatagaaatttcaggaaaaatagaaagtatatagaaaatccatataaataggaaacaacctacaaaaattccagaaaaaatataaaaacataaaaaaatcaacaagtattagaaattcagaaaaatacaaagaaatatagatgagtttatgtggaaaccaacttcgtgacatgacataagttaaactttagaatcatccatatcatacaaaatttaaaatctttggaatcatccttgcatccacaaatatagaattgtacatcatatttatacagggttacaatgtcttgatcaagaatgagacatgggtccatttaaatctttatctcttctatcttcttcatcatctcttctacaaatctttatatgttctaataaatctgccaggatgaaaaatataatctgaaatttaagtaataaatataaaatagtgatacttcagcaatcaaatttgaaggacggccattgatactagcttaggaaaaaaaaatgcatgcacatcaaccaacatattgcaattgtcagctacatcagcgtaaacaaactcttggtgtaagcactttctttttagatcaaacaccctacatgcagatacacaccattatttttaaatcaaacacatttgaagtccatgtttttgtactgatagttttccagcaatactctatttcaagtccatatttgaaagtaagttgagcatgcaattcaaattgaatcctggcaagaggaggaatgcaagagcacaattatgaattatcattatggacatgataaggaaaaaaaagtagtagtagtagtagtagttgttgttttaattaatcagtactactaggtcactttgtttggccagtgtattgtgcagggagtgagagagagaggagattgaaatatctgtgtgtgcgtgtctttgtatataggttgctgccaaagcttgtgttttttgaatgcacaatgccaccttgctcattttctgcttgtgatacatgacatgcaactaaagtttggactaatgtataagtatagagcataaaagacttcattttgtagtaagtatgagttcctatcaaaaatatgattgttaccatttatttagtcccaacatgcatgctaaattgaccactaattctacagttcctgacagagactacaagaatggatcagactaaaaagtgcctctagaaaaaacaaaaaacttgatgctagcagctcaaccagtactgagatctacctctaggttaacagagctgacagcatccaactaaaagaactgcatctctaattaactacaaaaaaactgttactggtttgcagactaaaatttctcatatacctcactagttgaaagatcctcactgcatgtgtgataattcctcatttcttgggactggcacattgatctcacatatttagactgcactaagcatgatattacactgtaggaaaaaccagagcacaacctactccatcaaattagaacatcatcttaccaaaactctttcatgatctaaaacaagagcaccatacgcgcacccatatcccattctgaatcgcttccataacaaaatgaattgctactgcagggtacaatactacaatgtattagaaagaacaggagaacagagtacaactctcccaaaccaaatcaagaacagaccagacatacaccaagaaaactgaagtactgaacgaacccccaagaatcaagcagcagctacaagggcacaaacctagccgggcaaccgccggcgggcgtcgagcagcgaggaggaggaggcggatctgcgcctcagcgcctcctccgccggtgagtcgcgccgccttcgatccccctgtccccgcctgcttggagccgtgcgcccacgctaccggcgcgccgcctcgtcgtcattaccccggctgccgtggtgccacccgccgcgcccacgtgtcggtgcctgtgatgcaagcgctaaggccggagagcgagattgggagctaactagaggaggcggaaaccctagaggaggaggagaacggaaaccctaggaggaggagaggagaggaatgaggagaagggcttacccttctcgccggaggaggagtcccgacggtggcgggtctcgccgaagaaggaggcgcggcggcgcccgctgttgttcgcacgagagagaagggactcctgttgcgcgagcgagaagcagcggcggattgagagaggaaaaattcccgacctccgaaggtcggggtcctttccctagggtttccccgcggattgggccgggaaatccctgcctcgtgggcttccaaatggacatggaataaaacccgtgacaatttcccccgtgggcctttctcccagggaatgggctgggatcccagtgggatcctgggctgccaaaggagccctaagggtgagtttgagggataggggattaagaagattgggaagatacacaaaacaaggtgagccattagcgcatgattaattgagtataaactattttaaatttcaaaaatggattaatatgattttttaaagcaacatttctatagaatttttttgccaaaaacacactgtttagtagtttgggaagcgtgtgcgcggactacaatgtgctttctcaccctaactcaccagaacgaacgctaagtttagtaaagtttttgcatgtagcactagtatagtcgagttctgtatctcaattctcaactaaggctgcgttggcacggaaaacagagcagcgattagcgcgtgattaattaagtatttgctatttttttcaaaaatggattaatatgatttttttaagcaactttcgtatagaatttttttgtaaaatacgcaccgtttagtagtttgaaaagcgtgcgcgtggaaaatgagtgagggaagttgggaacctttggtatagaacgcagcctagggatgatataggaatggtgtcaatagttgtaattatcattgtgaacaacagaacaactgcattttctactgcaggtaggcaaacatttctttgggttgccagatagggaaaaacctacacagtaatggcattgtccacttagctgcaatttgggatcatttacccatattttaattctgtctaaaatttatactctgtttctttttgtttctttttaccagtatgttttctctgttttgaattaaaatttcagaatctttgaaatgtaggtactgtggagtttgacaaataaaaacacattaaacaagattgttatttttcttgtttttggacacggtgcaccatttcaaacttactgattaaatccatcttctcataacacttatttgggcgagcattaaattgcaggacagttcagatagcagtagcagtgaagatgatgctacagacaaatcagttataggatttgccagtgcaatggtctggttgatagggatggccgtagtcactgctatgttgtctagttatgttgttactacaatagaggtataatttggaagatgatgaacatttataaacatggtagtcattttcttttcatcacccaaaattcaattggattgactactgtaacaatctctattaacaggaagcatcagaatcaatgggtatccctgtcaggttcattagtattatcctactacctattgttggaaatgcagcagagcatgcaggcgctatcatatttgccttcaagaacaaaatcgtaaggacgtatccaatgtttctactagtcaagtttgtacatattatgtgagttcagattacccaagttaactggtagatgttatgtaggatatcagtctgggaattactcttggatcagcaactcaaatatcgatgcttgtggtgcgtaattaatagtagtgttcttcgactttgaaggactttctggtatgattatctttagatttttcatgagtgtatttattctacatgattaggtaccagtcattctaattgtgtcctgggtgaatgccatccctatggatcttgacttcaaccttcttgagactggatcattggcaatggcagtaatcaccaccgcatttacacttcaggtaataaaaataattgctaacagatgcaccaattttttttttgtcaagactaacacatgtcggatgaattttatgtctataattttacaggatgacaaatggcattacttgaagggtttgaatctagtattttcctatatcgtcatagcggtgtgctttttcgtcatgaaagctctcccaagtaagcacgctgcacattaatacataatcatgcctgaccatttaatctaatgcattcatgtaaataaatttctgcatattacagaagttaagtaaaacaaggatttgatctaaccgagatagaaaaataagcatatatactaatctacagaaaattaatcacattttgtggaagatattggctgatttttatctatgtaaatagagtaacatccttaaataacttatgactcctttgtttatctacttggtgacacagcgctaaaaaaggaagatgactaaatgtgttgttttgaaccgaatcaagagaccgatgagacgatgcatgcatgtgagttgaagactgtagctagatcggtgagctcctgatcaagctgttcatcatcatgacgggttcagctaattaatcagcaacaacagcagtgaatatatggtaggttcatctgaagcgacgggaacaagattactgatagatgttttgattgctttggtgttttcaggtgattagtgtagatttgggaaatgatcttgaggtattcgtaggatggtgtttttagtgtaaaccatttattgggtcaatgcgttatcttctttattaacgaaaggaggcagagcttctgcctttattttaacaaacaagatcacagtagccttggttcttttgcctatcctagtgtggtcgagcgacagtctgacttgaggaaaacaactttttcttcagcacttattttagtttcattttatccgtgttatgcactttttttttcttagagaagggtatcctctacatacaaccggatatatatagtatttttaaattagaaacttagcctatcaaatatagaacttagccctgaaataatccaatctgaaattcgctcctatggagacttgaactcagaatcttggggtactactcaggtcactgcaaccaaaagtgttatacactttggatttcttaattagtggtttgcacacacacatagatattatacaagggaaattttgtggtgcatataatgaatatatacaccatatgtttgtttcaacataatggtcttacttgtggggagttactatatgagtacaggactcttataaaggaaatagctaataagtgatttaattcaaataacaattgtaacatggcctgagatcaaactttattgtaacactgttaatttgagggaaattggtaaaacccacacggagcaccaagatatgtagttggaccttctatgagacaccaacagagtaacagaccggccacggcccctcccctcacccccaccccacagctggcctcctcccttcacgcctcgccagtgcgcccctagcacgtccaacttctcgcgtcgttgccatggtaggcctctctccgtgccaccacaaccaactccacctcgcgccgccatgttcaccaatttctcctcacaggtgcaccacctgctctgctctgcaccggccgctgttgtcgctcacgtgccacccatttcttccgtgttaaatacagtggccaaagccgagctccagtcctaagacgtagtcctatcttgccacatagtttccggtgacccgctttaggtggcaacgaggtcagggagggaggggagaggtggtggccggttagggttttggtcgtcgctcatgattctaaactggtacatgatttttttttcccgtgttatgggtggagggctcaatccaaacttttgtaaaagagtaaattacgctagcggtaagggaagaaaattactccctcatccaaaagaactctgttcttgaacgacacttctatagcacaattatcaagaaaaaaaagaactgtacacaaacttctaataaacgcttatttcagttcataaacttgcaacaaaatgtttgcgatccgaagtcaacatagtacaccatacctaatcttgcttatgtggatgctgattaagatgccacacatacgcgcatactccctccgtcccaaaaaaggcaaaccctggtttttcgtgtccaactttgactgtctgtcttatatgaaatttttttataattcgtattttcattgttgttagatgataaaacatgattaatattttatgcatgacttgtctttttaatttttttcataattttttcaaataagacggacggtcaaacgttgagcacgaaaactagggtttgtctttttttgaaacagagggagtacatgactagggtactaggcatgttatatttgaaaacaaactatgtacttggtttctattttttttcttcttttacctctctctatccctgcacctggccttcatctgagcatatgtataacttatggttaagtgaacatgtatatgcttatgtggcattctaattacgtagaggagtagaattacgtagaggagtagacgttagtaagatcagccatgcatggtttgttgttttagccttcgtttacacaaactacgaatgttcctacatggaaattggcatcttataagtttaggttataaaaaaaatactctttttttaaaattgacaatattgcacccacttcacaggttcgtataccactaatataatatattctttttttaaaaaaaacctgtatcaaagtttgcacaaatcttaaagtaccatctgggcaaacttgtactcctgcttcatatcataagttgtttagttttttcctagtcaaatttctttaggttttcccaagtttctagaataatatagtagtatttttaatataaaacaaacatattatcgaaaatatttaatttcaattttaatgaaactaacttagtgttgtgcattttgctaatttttttttgtcaaacctaaataattttaaataggaaaaaaaatcaaacgacttataatatgaaacggagggagcaccttgtatagcagtctataggccatccagactatcttgacatatgtccgtagcccagctctctcctcgcttatctctgatccttctcctacctgctgcccccaggtaatgtgtctgcacattctttgtgtgtgtacatgaagtttgagaggcgttttgctcaagaccgcgcaacgattccatatgacaccgcatcgttgtccatgcctatcatgttcatccagagcccctgttgatcttcagataagagaaaagctcaaaattaaagaaggcttgtttattgatcatgtcaaggataggtatcgacggcgatgcgctggctatggccatggttgtgcggttcttgcgcaataacgttttgatctcgatctcctctcctctctccaaagtttttctttctttactcctctgatggaacaatgcatgcatttactgagtttttgtctcctgttcttcctcgtctgcatgttcttgaatggtttggtcgctcttattcttctgtgatttccttgtccatcattatctcagggcatgcatgaaagctctataaattaagatggaaccttttcttttagttttgttgatgatgactaatttggtttgttgctagctactagctgttgtttcctgtctgaaaactatgaagctatcttgtaaggtaggtaagacgaatgcggaggttcttactacttcggcccttgcctagagcttcagaaatataaactaagattaccatgaagaacaggtgtgtgcaactttatttatggtattgatgaaaactcaatctagtaaacatcatgtatgatccagtagatcgatcgattagattcatcgtacctgaatctatttttgcttaccgtactgtagctagtctttcaccttcagtctttgcaagttatatttttttatactaggtttcgttcttgcatacttgcaaatgctcttgtaattgagttttcagagttctccacttgcaataacaaatattttggttgtctttccatgaagcagatcagatggctagatagatggtaaatgatctgaaaaatataaaagaagattacaggcactgtttgacaatacttaactgaatctatatgcaacttatctttcagtacattgcactggaatttgccatttgctagcacttgctgcctatctgtagtgcttatgggattcatgtcagaactaactactacctgtattttgtaggtttaagagtgtaaattattggtccccttcttgcattttctctcaatttattcaggtaacaaacgcttgcaagtctgctattttaagcattgcaagcagtactagtactatatatatacatgctccgctaatggtcaggcaacagaagaccaaacattgtactaggccagccatctcgttacatacttacatcaatgtttgcactgtgatgtgactcttgatgcattatttgctcgatcatatatatgtaaaatatagccagttctcatgcataattcatgtgagaagatcgagcaagagtggtcgagccgtccaagaagacattataaaaccacaaaagttccaacatattgatcattgattgctgctgtcctacagcatccagagtgctataaattcacatcatcaattcatcatctccaatataatgcagctgcaagtttcatacatggatgtggcttgtttccgacatcgcagaggttaacttcttgttgctatcctccattatctattaaaaaaaaaatcttgttactatcctgatggtcagagttgcctgatgatcgattgatgtctttttgggggtctctccatggaattgcacagacaaatacccagtgttctagattccagaaatgttatcagtgacaatgtgtgttcaggctaggtgccaaaggaagtacaggtaccccatctgttgactcttgtgctagcagcgtgcaagcaagcagacaatcatgcatatggtctcagtaattgcatatgagtgatgtaggacatggtgtttactcccctgaatgcaggcccggccttgatcaggggctaattaacattacttagtgcaatctttgctctgttttgtaattacattgatgtgccagataagctacagtacatcaggaatgagaggagtgcatcaaaatactgaagaccatgatggatatttcgaaattgcaaatgaggggtggccggtctgtaaaaacagttttctcctaaaagatcgacattgctcaagcgaccttaatctagaaaataatttcaaaggtacttcagaatggtcaaagctcagttctgcgatagacattgtcatagacatttggatgcatgtgtcatggaagtgcttatactattaatatgaacatgtattttggtttttttttaaaaaaaaaaaactggcacatgattgtcaattttgcctagcgatagcaaaataggtgtgtgaagtttaaacatagtaaaccatgactttatcaacccactcaaatcatgctccttatgaaaagttctagatgagaaaaattttaggtttgggagtgtctagattgaaatttttagtcgtttttctacccacttggatgtcaatccaatggttctcatcactcccactatcattctttcttaggtatatataaatatattgtttgtaggaaactaggaatcatggcatggatcaatgaggaggcactttctaagccaagtgatcaagtcaaggtgcaaacttatcacgaagggtatgtattctagctcttcttcctccgaacatacaagcataacttaaaatggaatcttattgaggagtacttttatatttactgaacttgggttgtagtctttcagaactcattcgaagtgtttttgcggcctgcaatcctaatcggccaataacacatacgccttctggccaaactcctctacccttactctcataaataggtaaccataatcccttaacgttcacattaaaaccccaaatttatgatattgatctagtgtcctttccatgttctcttgcatctttctttcattgtcttgtaggagctaaccttcatatgaggtcaatgtaccaaggaaaggttgataacaatcaaaatcgaaaggatggagtaacgattgcgtgagtgctagtcctcagaattaattggccagaccatcaaacattgttcctcattgattggtagtaattaattgtctagacattgtggaatgatgggaaggtatctagctttttctctatggataaccatggcaaattcttttctaaaatgatcttgacaaacagaaattagagaattaatgcttctgaagatcttgttgtttcctgttatctagattatccaggacattgcaattacgatctccatgtagatagggacttacaacttgattttcatatattcaatagttcaattgcctcctacagtaagacatatctcattcttgtagatcgataaaaaaaatcccagcattgtagcgcaaaaggacatgtgaagaagagatgttggagagtttcttcatgcctcagattacacacaacacaagtagtaatctggtctcaaaaattttcttgtattcaatctaatattgagtatcagcgaaaaaaaaaagactttgtgctttggttgtgagcaacatttccataaaccagttaaaagaaactgcaatgtttacagtccccaatgaaacatttgtatccttttattgatgatgagtattgatccgagttccaaatagtacaaacatccttctggtcatagagactcagatcttgtaggatggcatgttggtcctcaaactggttgtaggcttccactgacagacaggttaaagatgttgcctagttcatcctgttcagaaactagttccagtatgatattagactttgttatcaatgaaaagaatgtgcctgatgcccattccattgatctttccataacataagagggttcggtttgttagacagaccacttgcaaatctgcaatagccttgaaagattccattaacttcatattgtgtccccccacaagaaagattcatctcttaatctaaaaggtggtttacttctattaatatatatagttggctgtgtatatccgtttggatgtagaggctggtttaatccattatctaaaaaaaattaatatatatagttgccaaagcatgcaaatgcacccgaggaatatcaaaatgtcttgtgcaggtttttgatgagcagagtattatgcaggtctaacagtagaatctactcaaattgaaattctttatcttgttgaaaactggttgctttatttaactcaactccacttagggtggatcatttgtagtaattaactagttgaaaccctgcgctttgctatggaatacatggatgattttatgctatatataatataaattatggatatatatgttaaataatgtgaaaatgatgtgaggatgataattgacatgatttggtatgcttggagtaataaattgtatatatgtcatggttccatgagctttaaaataccatagataaatattgctagtgagtgatcatgtgtcatatttagatgttaagcttatagtactaagtagtgggtatagaaggtatagatgtatcattgggttttgtctctcagtgacacagcggtcagttacccaatctctaaaaaacaaacccttttcaccataggcgagcaacgatagcgagctatgtactacacattcgaaaatcgaaataacctcgtagtcttgaagtatccaaaggtgttacaaatttatcgtagaaaatgtgctctctttattagcatctactaaacaaaacgaaattctctctcttttttaaagtcaagtttcaatgtacgcctgacaactttacaggtgaacagaaatatagaattgacgtaacttgccaaacaggccctcaagataccttgaaccggtatgaagtctttgtcgtccaaaacgagatcagaagagaaaaatgagcaaaagacatcatttttcttgactctcatacataccatatatttcgttttcttaacaaatgggtagtcaaacatatacaaagtagtagcctgtactttaaatattctaactaattggctggtctgaatcgacaagctatattgggggtgacaaaaagcacacaatttcaaaaagagaacatcatttgctcctacttttctgaacatcaagacagctggggtgccaccgtgccacgatatattgtattcagatcgacattgtggacactgcattcagatcgaccacgattgcaaatatcaacaaatataattcactgtattttgccctacttctgttgcaacatttcagatcacgtcgagacaaacgagcatgggaatggcagtgtatatgatccgtcaaagcttatcatcttgcatatttacattatcttaaaattgctaatccgcaatatggaggattttcaaagaaattttgtttactccttttgatttcaaatgtaagttgtttaaacttgtacacataaattaagaaaccagctcaaatgactaagttacctttcatttttactacattgaaaaagatgatctgtttatttgtgagtaatggcttgcatttagcaagggcaaatggacatgcatctgtgcaaaagtactgtaagattaaaaacggtgacttacatttagtaaagcgccgagaaaactaaaacgatttatccacatcactccctccattaaatagtataaatcattttagttacgtttgtctaagctaaactactttaagtttgactaagtttgcacaaaatatagaaacactcaaaaaaagataaagagataaatatattaaaaatatattttcagtcgtggattttgtgaaactaattaaatttgaccagagtttgacttacgatatactaaaataacttatatataatgtatgaaacacacgaaaatcctagcagtccatgcgaaaattcttgccgtccgaacaagccttcattagttgcgactacttggcctagccatatagcagggtcatgtacttcagttggacgaactggacttgcaagttggtagtgcaagtgcagtagcacacggcttgacgaagctagccacagataatcccatttttttgctagcgtgttgcaaccttgtgaattgctgtcctggttacgtcgtcatgggccttgcaagaagcgttcaaagcaagttgtgttgacctggctgcatgcctagctagctcgttcattccctctgtgactgaaaattattccagggatattgctgaatatgataggttagtgttagttatcggcggtccaaccacgttggtcgccatcagaggcatatgtgtaaagcctcatgcggagaaatctgaaagtttttgtggccttttggtgccgggtaaaaggagaacacatggagatctcaacgcaaaagaaaatcgtcatagcgtgttataagttaactgagaaaaaatgggtgttcaactcttaagagccagaaaatttgggattgttcaactttcaagagccagagaactgaagcaagcccgtctgattttgatgtacggtatggccataggggggaagaataatctcaaatagagaatacaggagcattattccgttttatattatgaaagtattctaggagaaattttactgtcgtaaataagtagataccaaaaatatttactgttaatttatatatagtacctcctgatacattaattataaggatattgagaggtataccaaaatttacatacaagcatgatatcttccagtattttctaaagaaccataaaaagtctcatattacaaagagaaattcaagttattgttaatcattatggatcagaaattaattaatttatacacatgctggtgtcacatcgtttttaaatagtacttataaaataaccaaactatatttttaggacagaaagtttgttatttttaattgaacacatgaataccacgttcaaaatctttatatcgtcccttcaaatcccatttgtagtccgttgacatgtcgatataggattgactctgacttgcacgcaaccgaagtgccatcaccacttcaccagttcaccactagatcaagctttacctattgcagcgcgctaatgcagacgtatagtttcaccaatcagctcattactcacaaataacaaagagctttctggtaaattgagatagagagataaattaaaacttaattttgaattttgaaatttaattttagacttgattttgtattttttttgtcgtactatattttacaacatttatttttaaattgctaaggacatatatataaaggttttatacacaaattagttttagttgaactatatggataagtataagcataattggaatgatgggacgtaaaagctctacattacacataaaaataacgccttaatttcaacagaatctagataacaaattggacgataattaagacacataattaacacgatgattaattgttctgtgagctgttggcttaattcttttctttacatgatcatgtaaccaaatctgagaatggagagacgtgtttaatattccatgctagctttcgtgattaaacatctccaataatgccgggaagaagagtgaaaaagaaaggagatcagtgctaagaggccaaatcatgtgtcttatttaatccacatcctttaaccagattgaaggcaaattggtttcaattttcaacaacacgattgagatgttctccccctacatacttttaattggacaagaggaaatatatatatgaccatacagcacagcaagtccaagtaaaaaaggcatgcttttgagttttttctactcccaacaaagattctcacggacagctagctagcagaccatttcaaaagaagaaaaaaaatgaagacaaaaaaagtatggcaaatccgacaggaatatgttcatctagtctataaaaaaaagtaagattggtgctatctcagccataaaaaaaaacattttgactcgatccattctgctgtacttacttccaatgaaagaaaagtaattaccgagtcagagtggtcagtctcgtatttgtcgaaacatgcatggatgacgccggccatcagcatttcggcgcaattgcaccgaccaaataagcatcctctgtgcctgttaaactcactatcaaaattaaaaaaagaattaagctgtagggaatgtgatgcatacaacattcactaaatgggctattcgatttggctattcccttttttatgagcacgtttacaaaactgttaaatagcgtacttcgtgaataattttctatattttttaatttataatagttaatacttaatcaattctacattaattacattaatgactcatctcattttatgtgtaaggaaaaaaaataggcctaacacgtcattggaatggagtagtacatagtatatcaatttcttatttgtaactctacaactctggtatttatgtggattgggtttatagaggtcgaatgcataagttttatagaaatttcagatcaattagctaaaaatcatataaaacctcacaattttaagggctcctttgaaacataagattgaaaaaaaaatgaaggaacaaggaaaacacatgatgttgaatagatcgtaagtgcaaaatagaaaaatgtaaaacataggaaaaaacaggaatggtcggtttaaatcggatgaaataaatagacttaaaaataagaaattttgaagaggttggagcttttggtaacttttctctgaaatcttcgtagaattgttcattccataggaattttgaaaaagaaaaggtaggatcatttgtttcatatgcatttatgtgtatgtttcttatagcattaaaatcctcaaaatttcatatgtttttctaacaaattaaaacagcctgaaggaggtgcaacatcgagttggaagcaaggacccatctttttgtgggataaaccacatatattttcccaaaaaagatagaccaccatgtatttttattctaaataaaaagagcttcaaaacattttgttgcattccactacaagaatactacgtcattagtatttgaggtctcaagatatctatgaccctgacatcacgccgaatgacacgacaagaggagacttccgctggtgtccttttcccacgaaaccgacttgaccattcataagcagtatatttatgatgttatattttaataaacagtcataataaattacctacacctacacttatattataattacactataaattttaaaacttatattataaactcggccttcatttcaaaaaacttaacattgcctatgaatcacatactctatatttagattcgtagttagaagttatttttttaatggagagagtaagtttcaatatttatattataaattttctaatacacagagtataagagaattatgattaaaaataatttattatctacttataataggaaatagagagataggagcatacatacatataggagaaattaagtgaaaactatgttgcccatatttctaagtaaacccattgaataacatcaaaacaaaaccattttttcgctacacgaactaacatttaataaaatcgctttaacgttccaaccaattaaattaggggcgattggttgggtacgtaagtagttattctaaacaaaatttggatgctaggaccacacttatattttgggatttttggagagaaagagcgtatcttacaccatcaattgctaaatataagcatcaagatcatgacacattttcccttttctttttcatgaaatggatgattgcattaacatgcacgcttcccaagcttaatttaaaaatagtttttatatgaaaatctaaaaaataaacattttttcaattttataatagttaattcatttatctgtatccttaaataattattaaaaaatattcatcaactgagttattcaactatccacgtgtgaaagaaaaagttgaggtggtttgtcgtggtagtagagtcgtttgctgctaattctattagcccatgtttagttcccaaataaaaatttttcacctgttacattgaatgtttgacacatgtatagagcattaaatatagaaaagaaagctaattacacagattacgtgtaaattatgagacaaatcttttaagtctaattgtgctatgatttgacaatatgatgctacagtaaacatttgctaataacggattaattaggtttaataaattcgtctagcagtttacaagcggaatctgtaatttgctttgttattagactacgtttaatactttaaatgtgtatccgtatatctgacttttcgtcttgcgaccatgttctcagttaggcagcatggtaggttgcacattaactgcaaagaataaaagaaacaacatagcgtggtctcactactaggctactggctcacctgaatttctcagtgcgcattttggtccatcacctctcctcaatttgttcacagatggatttagcttcttttttaaaaaaaagtgtaatttttatccggtctttacatccaaccgaatatatacagtctttttaaattgaaaacttagcacattaaactgggaagttagcttttaaattacccaatctgaaattcgcttatatagagatttgaacttaggatcttgagatgctatttaggtcactgcaactattaggctacatgccctttcacatacgggtttagcttatgccaatacgatgcaccgctttattgtaaattattagtctcctataatttcttcagtgttataggtggtatatatagttttgacattagatggtttatgcaaaagtacatacatagagtcgtaagttatataagatgcccaagtagtaaattatttcttattaatcctttttaaaacttgttataatttaaaatcgtatctaatacaaagggcctgtttactttgacgtcattttcaaccataccattttttaataaagttgtcaaaattttggctatgtttagtttgttgtcaaattttagtaagtacatatgaaatcttgctgaaatttggcaaacattgccaaaattttagcaaccttataaaaatttggcaatgccaaaacttgatgagattgaaaatggtagcaaagtgaataagcccaaaaattatggtcaaagtgatatctaaaaaccatgaacgaatactcctactcggtatatcttaccatccaacatattaatactacctagcctggttcgatttggttatttggatgagctacttcgtttgtctttcataaacacgctttttatattgttgcatgatacattttttatataaaataaattttaataataaaaaaaatatgaattacctcctgaattattgtgattgtataaattatccctgaaaaaacaaaattttacaccccggacttttcaaatcggaaaataacctttagcccaatccgaagcgatcttttatcacacatgacggtctagtcagccaaaaattattaaagaaactgggctccacctgtgaacccctttctcttctctcccacctcttacccttccatctctctctcccaaaaggccagaacaaagcatgaaagaggtggtgcactaggttcgcggcggctacaacaacattaatgggcgtcgggagagccaacggccacttcgcatgtcaaggaggcagaggtgacaacggtactctgtatggggaggcggaggcgacaacgacagcacgagggggaggtggccgccacgcccgacgtctacatagcctagaagcttgttgtcaggaccataccaccctagatttttcctactcgaggcgctagcccactggatcaacacccggtagcaccggatcaaggagaggccaccaacatcgaggttgttcccgctccatgcccaccaaccaatcggtgatagcttccccgtactataatcgaggagctcgtggtgaaggaaggtgaatcgtcaatcttgacattattgcatgatccattctaaagcagttgctagatccgtacctcatcaccgaagctctccctatttcgctggcttagagctggcctcgacaaccaagccatcgtcctcagctcacccagggggaagaggacgatgatgtcgcctaggcaacacaggtagtagtgcgccgcccatccaccccccctccccaaaccctgcggcctccccctcatgatgtcgttgccgcctccctttgacgccctgcaggccatcggttacagcttctcacaacgccccaccacctttgcttctcccgacaagccgagtagcgttggcgccttctccaacgctcagtaatgcttccgccgcggccgcaaccctagtccgccgtgacactcgatgggtagagtagtaattgaaaaatagagagatggaagggaaatggagataggataaaacaaaaaggggctgacaggtggagctcacatattttttattaaaatttttgatctaattattttttattaaaatttggccaactagatgaccacattggtgccacgtaggatcaaaaccgatatgtattgggtttaggggttgttcatccggtttggaaagttcatggtataaaatgtttggttttgtggttcgggtttatcgtgtgacaatggctcatctaattttagtgcaattaaaaaagctaatatctactccttctatttcaagttataagatgttttggtcaaagtcaaactgttttaaatttgaccaagtttgtagaaaaaagtagaaacaattttaacccaagacaaatttattataaaaatgtattcaattattgatttgatgaaactaatttagtattatatttgcttataaacttagcaaatttaaaacagtttgactttgatcaaagtgaaaacatcctgtaacctgtaacctgaaacagagggagtaccactcatttgaacggagcctaaagttatgaacatggcagatgaaccataaactctggattccatattcaacaaccacaaatttaaggtccgttccttttaagcaactcggtaagatttttcacggtatgaaaaaggagaagataaagcgagtgattaattaactattaactaatgcaaacttgaaaaaatatttatttttatagaaacttttatatattaagtttttggacgaaacacataattaaaaagtctgggaagtgtgctcagggagaaatgaggaagttgctggatcaaacttagcataaaggagttaaggagatgatcatgggagccgaatcttaaattgtcattccacatccaacagcagttaagaaatattagaacctgcaattaaagagaattccaaatcttgctgaaaattttataatattttcggtagaaaaacgtgcatttcgtgcagggcgtgtgtgtaagctgcgcaccaacgcagttacgcagagcagcctagcaggtgctgcgaccgcgagcttgagagcattttcatttaagaatctccccctcatcgataaataaattcaaacaaaaaaaaggaagaaggaaatttctgaaaaggttcggcagctgagctcagctgagctctggtccgaagtcttcttcccccatcttggacgaagccgcgtttttccacggccacctccccctaacattctccctcttctcttctcgccgcgttcaaaacccacctcctcctcctcctcctcctcctccaacctctctccccacctcgcgcctttttcgctattttcctctctctcccagcgcgcggccaccgccctcttcttcttcctgttcttccaccaccacatcggcgccgcctgtctcatgtgggcttagccatgacgcggctcgccgtgcgctctctggtggtcttgttcttgactgtggcctcgccgtttcttgttgctggtggtggtggcgccaagctcaacgcgtcgtcgtcgtcgtcgccgctgtacgggatcgagttcccgccgttcaacgccggcgtcgcggatggcggatgcgacgggaagctgatggtgcaggggatggaggaggtgagccggtccccttcgctgaagctgcatatgacccaccggtccgccgccgaggccgccgcggcgggcaggacgaggaaggagtcgttcttggattccgcggggaaggacgttgcccggatccacacgatgctcaggagggtggccggagcaggcggaggtagggcagcgacgaattcgacgccgcggcgcgcgctggcagagcggattgtggcgacggtggagtccggcgtcgcggtcgggtccggggagtacttggtggatctctacgtcggtacgccgccgcggcggttccagatgatcatggacaccggcagcgacctcaactggctgcagtgcgcgccctgcctcgattgcttcgagcagcgcggcccggtgttcgacccggcggcctccctttcctaccgcaacgtcacctgcggcgacccccgctgcggcctcgtcgcgccgccgacggcgcccagggcgtgccgccgcccgcactccgacccgtgcccgtactactactggtacggcgaccagtcgaacaccaccggcgacctcgccctcgaggccttcaccgtcaacctcaccgcccccggcgcgtcccggcgcgtcgacgacgtggtgttcggctgcggccactcgaaccgcggcctcttccacggggccgcggggctgctcggcctcggccgcggcgccctctccttcgcgtcccagctccgcgccgtgtacggccacgccttctcctactgcctcgtcgaccacggcagcagcgtcgggagcaagatcgtgttcggcgacgacgacgcgctgctcggccacccgcggctcaactacacggcgttcgcgccgtccgcggcggcggcggcggacacattctactacgtccagctcaagggcgtcctcgtcggcggcgagaagctcaacatctcgccgtccacgtgggacgtcggcaaggacgggtccggcggcacgatcatcgactccggcacgacgctgagctacttcgcggagccggcgtacgaggtgatccggcgggcgttcgtggagcgaatggacaaggcgtaccctctcgtcgccgacttcccggtgctgagcccgtgctacaacgtgtccggcgtggagagggtggaggtgccggagttctccctcctgttcgccgacggcgccgtctgggacttcccggcggagaactacttcgtccgcctcgaccccgacggcatcatgtgcctcgccgtcctcggcacgccgcgctccgccatgtccatcatcggcaacttccagcagcagaacttccacgtcctctacgacctgcagaacaaccgcctcggctttgcgccgcggcggtgcgccgaggtgtaagccggcgccggcgccggcgccggccacgagaggatccaccaatttgaaggtcctcattttgatcgaattcgggtttaggtgtggccaaatttggggcaaatttgggtgtagaaattttgggggcggaaattaaaggtcaggaggagggggttgacacgcaaagttgtatgtagcacaaaggtttcgaaatctccaagtaacagagatttttttaggaataattaggaatacttttttaccaaaaagattgcagtttgtatacagattttggttcaaaacatttcgcaagaattttcttctccagcttgctctgatctctctggtgttgatagcttagtagtacaactagtagtattgttaggatcgtgacatattggatcctgtcgtcctgtttgtgtgtgatggttcccctttctgggtgcaaatattatacagaaatcaatcatcagaacagtttcttttttctttcttcattgcgaaacgtgaccgctcaggcataattgaaccgaaatctcacctgggcatagctgagcaaacgaattgatacagagttacagggtatgacatgattgcaatctttcttcctgatgccgtggaggcgtggacagaaacagtgttcttccctggtggcgtcaacgtctcgtctactagtagccggtaaagaacaactgaacaagctggaaatctgcaacgccgcctcgatcagagtcgtgtgccgctcggcgaatgcaacgctgacaccgcggttttcttttgtcaactcataggcgcgcgcgtgaggagttggttggattcgttcgttggtcgagctcgcagagaatcgcaggtggttttgctttgctttgcttcggagcgcacgactcgacctactcgcgcagttcgtttcgagcgcgcggtggctggcggtgccgatcttgccgtcacagcctcacaggtggattggatgggattggatcgcatggtgatggaccgcgcgcgagctggcctaaggtctcctccaaggtgagtcagctagcttataaatctccacatcagttttttatgatgtggaagagagaagataagaagagagaatgcactatctcttcttaaagagctaagctactaaagaaaatgtgagaggaattgtaaaaacccaaagcattttaaataatatgctgtgagacaatctattggagaggtagactttttgctatctcttgtacgagatggacaagcatgaactagtgcactagctcaaccattaaaggaggcttaattgcgagctgcgctcttctgctgcggatgcaacccagctgggctagctgtttcactttttttttctaagaaaagggattggaggtacgaattattctttctgatttagtctacaaattgtaatattcaatggagaatttcaggacagtttggttctttttccattcaaaatggggttgattcgtgggtctgtgttttaccgatttttaagacgacacgtgccggtttgagatcgtgtaatattgcctagatggctggatggttctcaaccttccggccggtccggcaacagcagcctggttctcggaattttccaaaaaacagttgtgcctgctaatttacgcatcctcggttctaaacctgataggagtaattaattagcatatctgctgaagaacacatatgccctactaggaatctaggaccttgtcaacaaatcactactactacgtcaatgactgccaggtgccagctaggataagtactgtactaacttcagtttctcatgcatagtaacttactacatccatccgttctaaaatataagtatttttaacatagtgacaaatcaaatatttttaactaataatagtaaaaaaataaaaaagatcaatcatgtaaaattgatgttactagatttatcattaaacaaactatcatcgtatacaactctttttatttaaagcatcttacttttataggtattgttggtcaaagtagcatctcgtaaaccgtatcaggatccaaaaatgcttatattttaggacggatggagcagtaagatattatctctgtcctaaaataattgtaattctaaaatatttagtatatattaaggtttgagaaaaagactgacatacatgtgtaggttttttttatgagaggaatgaagtaggtaagagtaggagagtggttgatggtataatagggaaaattttgaatgtgaaatgattgatcgggcaattaatactctactgtgacaactattttaggattaatttaaatcctataaaaaccattattatggtatggaggtagtaacctgtttggcacagctccagctccagctccacccctcctggagctggagctcagccaaacagtttcagctccaataaaactagaagtagagttaggtggatctctctcacaaaatgaactagagttgtggagctgggtttaggcagctccacaactcaactccagactcaactcctggagtaatatttaggagttggagctgtaccaaacagccccagtaatcatagtactccctccatccacaaaagttacacctatttcacatttgagtttttccaaataagttgtttatatttgtaatctttattcattcaaaacttaaatgaagagataaattaaatgtttgattagaatccaagaagtcatctaaatacttattggttgcatgcttgcatttacttctttattttgttacttccaaaatgatttaatttctccttggtcttggtgataaaagtaatagatgtaacttttgtggatggagggaatattatatagagcatctctgttaagaaccagctggtactccctaagtagatgacgttccaaacgttaattttttttaattattacagaatatatatgatacaaagatttatagcgaagattattaatattaatagactaatccaccgtgaaaaatacatttgtatagtttaataagctttataaatatattgttagagaaattaacaattaaacatatctattgaaccataaatcaatgatctaaaatatattttactactgtaaaaatgaagttgtccccttctcacctctcctaacctatctttaattaacagaaggtgcactgctattcataaatccattcagggctaaacaaagtggagaatgaaagtgaaagggaaaacacggtagtcatggtctaacaacagaagtcgccggccggaagtccgtacggtctgggttggtaggagcaacgaacggacgaacgatctagttggaattgtatactcccatcgtttttagacgcaccgaccaatgcaaacccggtgcggtgccggtggccggagggatgctgcgtacgtgccattgattgcccccataaactcatctacctcgattatatcgtaatcgtttacccaagatcgattgatcgatttaattgccatcagaaactgcgtataaacatatgcgtgcgagcatttccaggctaatctgcactggagtatgcctactaggtatggaactgcgttaaacttcactgtagtctgtactagtattaaaacctgtgacttagtataatggcatttttttttgtttgtgcaggttttttttaagtaaattgtggtattacacggacttgttggtaagtgtaatctactacataaatttataaatttataaaatacttattttgatgcataatttagtgcgcgtaatttagtgcgcgtggactaagaccaaatgaacactacatagttaatcttgtttgatttagttgctgataagtttactagataaacatatatcatgtctccgttcaataaaaagataaaatgtgaaatagtgataataaagaaagatataaaaaaactgagcaataataaatggttagaaatatgtgaaattcttcatttcaatgttgagggataaagtgagaccaaatttgtaccgaagagattatgattattctttttttttgttatattaaacagaagagactatgactactccttgtgccggctctaagttatgtggtcaacagaagtacaccaaaaagaaacaagacatcaacctatccataataacacatttactactcaaaagaagtaatgcctccagttgattccttgtcttccgttcaaatatttaagctaaagaactgctgacgaaaaatacgaggcctaggagatttgcttaactccagtgcaggtccaaagctcgccttcaggtgtgttagcgtgccagttgatttgattttgcaatcaacaagaaatagagaactaactaaaatataactaaaataaaggagaattaactatacttgcaatgtatatttgttttagaataatctatttccacttgtacttagattctatctatctgtagaggaagagacacaatatggaggagaatcgacatcaaaatactcgaacaaacaatcagacgttgtcgagaatcagacttgtggagaaatgggccagaaacttagaattgacacgatcaaatgggcccataattcactgatcttagtctaaaagcagaagaggggacggactgccaagtactgggctggttgcccagccgagggttcggccaaaccctgggtttggctaaatcagtcccagcaccgtttgatccagggctttgatcagacggtgggaattcactcccaatggtagttggagggtattaccgacctttccaaccaccacaaccgtcattcttcagctataaaaagccatcacctcctctactccttcacacactcaagtaagctcaagatatctcttccacacattagtttagtattctagtgctaagtgaagtataatagaatagctctcggagtcctcggagtcttcggaggaatttcggtatagctttagtagttttccttctttcttttgtaagactctcggaattaatgaaatattattctttatatactctcgatactttagtatatctgagtattgtctttactttatacctgtatcagcgcagtcgtatagttagcctgccacagaggtgcagtggtgtgggtttaatatctgatcactcggttactatatgtcatctcgagggatgtagagtagtatttaatagtatagatgtggtgtctagattattaagtatcattatctgggcatatatgttacgggtcagtcgaggtgggccgctgatggttacagctcagtacggttattactccacgatagtatatattcctaagaaactttcctggggagggtactcctccatatttagccccggttggacggcaatgacaggttgtcgtaagaaacttggcaacctggggtggtctctcgaaacaccaggagggcactcttagggagtattggctatatggttgtatactagcaggtgtaaactaaagttgagtgtatactagagttataggaattgattgtttttctatttcttcttccacttagtttaggaatgattaaatgagatatatgagtgctttgcttcgtgtcactctacccatataaatatcttaacccctattaacgccaaaatttggtaagcccgaagtcaccgtcggcctagagtcagtatcggcttcagagtcctggaatcagccgatgggaattatcaagtcgccaatagccggattcttgctatattcggttaaggaaattaatctattaaaggaagtttatccagaagtgaccgagttcaaggaggatgcggcatagcagtttatctattaattaggcagtatttgttagtttccttttatctttaggaatgtgtgtttagtgtccgataaggactttatgttttccttttatctttagaaaagtttctttcttgtcctacaaggactagtatctacttatgggtataaatatgtacacccggggtcattgtaatatatctctcgatcaatacaactactcttggcgcatcgccaccctctttaccgagatttttacttatcatccggcggaatttggcacctgacgtggggctgcatcggttcagttcgatctccggcgaaggggtaagtcctacgttctgctggccctggtgaatctatcggctacattggtgttgttcaaggctgcaccgcttcgatctcttggatcgctctggtttggttgatatatttgcctacctgatatctcaattctatctctaattgcattgtgtttagagacacatcggtttagttggaactgtctcagttaggtccgatcttctgtcttagcaaatatatctttacaatcacaatgctattataaataaatttgttatatccatcatattagatagatctatcggcttatcgagtattagattatcatatacaatgtcgtgctacatcggttaggttcgacctactagattgttgttgataatataaatcttgttaagccgataggttcatgctagtgttttatcggggtgctagccgataagttatctggatgttgcatcggcttacaaggattacatacaagttggatttagccgatcgcaacaaagattttactgtttatctaatcttatggatttaatgacatcggacctccagccgatgtatgctttaaccttcggatcgttgcttatctatcatatcattattagccgattggtttatactggattatattactgttatattttattatcatcagccaattgcctttatatcattatctacattggacatatagccgattgctcaaaacccaatcgacatcggctgggattactccatcggcttgtcagccgatcggctatttgatctactgtttacatatcttgtcagttgtaggatcaaactgactagcacgtccgcatctcatcgagatttggacctgcacttgagctaagcagatctcccaggccagcgtgtgttttctgcgtcaacaacccctgcctagactttgattatacaagtgcatgtatacattattagcatagttctctcttacaatcttccattgggattaaataaatatgataccttggaatactcccgggtgaaatgctataatagtatatccgtgcgcttgcggattttttctgtgaatcatatatataccaggaccatttctagcgccattgctaggaatttatatttctagcaatatcgttaagaaataccaaaagtgggacacgcagtggctggcggtggagctggctgccagctcagatctgacgccgctcgcccactgccaccgcctaccatggttgggtcgccggcaagctccctctcctcctcggagctcgccggcttggctccgggaagaaatgggagcggtggcgaaatccccaaatccattgtctcctcctcctccgccgccgcatggatccagctgccggctcgccagatccaacgtcgggggcgacctcctccacggcggtgccgggtgcgaccttctctgtgtcgtccctgcccaagtcggcaactctgactgcgccgcgcgcctcgccgtcctcttgtccaggcaggccatcgacgggatcgacgatgaccagatttgagccgcgctagatgctagcgacgacgacccaagctcctttcgcctcgctctctcatcaacaaggtcactgtcgccgtggttgacgaagcagagtaagaggagacaggagaaagaaggaagaaaatggaaaaaaaaagagatggatggaaaacgtgacggcaatggcactgttttagttttgtaaaattctagtggcacggttacgaatagacgaattgtaatggtatttttctgaataggcaaatttgcagtggcatggatgctattaacccaaagaacatagatgattcatgactatatcatatagtgcagaggtaggcggaagttaacacaaacactataaaaatatttttttggacgagcacccaataagtagcagacggaccaaaagtattcgcgtctacgaaattcgactctcatttttccatacagctccttaagaaatctgtatgcaaaaaatattttttcccggacggactatttaaaatatctgcacgtgaaaataatggtattttcacaagtggggctctaactcatctgcatgcgaaaatacccccggaaaattcctactctttttttattcaccactcctctctctccctcacccccactcctctcccggcactctctctctcccactcctctccctcactcctctccccacctcctctccctacccctccctcctggcggcggcagtggtgacggcgacggtttcctcctcttctccctcactcctctccccactcctccctctcgacggcggtggagcactcaagcaacaggggagggtggaggaggcgtgcgaaggcacagatccgacggcggcggccatcgcccgcgcggatcctacagcggccaccctccacccacgtagcaacgacggatctggcggtggggaggcgtggttgcatcgcctgtgcggatccgacagcggccgccctccccccgcgtggtggcggcggatccggcgacggcgactacgacgggagcgggcgaacctggccgcatctagccccctaccttgttctcgccggcgtcgacggcttcaagcaacgacggtgaagatgacagcagcggcttcgagggttagggtttcaccatttttggttttttatttttacgtacaagcgatgtaagcacccgcacgcaaaaatcagactttcgcgtgcgggtgcaccaccacacgtaaaaatagtgattttcacatatcatttagtgtgtgcagatcaccctgctgcctgcgaaaaccgggattggatcgtatggaaaaaccggatttgtagtagtgtaaactcatcaactccagattatgtacaactctccctatcgtgttgtaaacatatttttttaagaaaatacgcaagatatcattttttaattttattataaaattttgatacttatagatacttttttaagcaccagagaaattcttgtgttataatatgtaggttttcaaccatgcaatattgttggattacacaagccacactaaactgcaatagatttgtacctgagaacaaacgctgggccaggcaagaatccctctcccacgcgaccacgccgtgtcgtttctctgacctatggaaacgcgagcacaggggcatgtgcactgaccgtacgtgctgccgacctggcctttcgccgttcgattcggagaatttttgctaattcggggcttaatttctcctcctttccatctgcctcattcagggataagcccggaagcaatatcaattatggacaagacttccttgcaaattccatggaggacattaagttaaaaccacagcttaactgcaaacaagtcagtaccacttgactattcagatctgtaggactttgtgtgtgcgctgctcactttcctaagctagttttgtcagccacgttcgtgtgatgtgagttgagttggtaaccaactgatcagctttggaccatgtaaatggattaaaagatggcaacgtttttttagcggcttctccaatgagtcacggttgtgtgcaaaattgatgctgtatggcttattttagtcgatctagcacaccgattcagatgctatattatactctttccgtcttaaaaaaaatattggatgagatatttttttatgcaacaaatctttaaaaatatccaatctaatgttagattagttttttaacgaaggaagtacacttaccacatatgacaccagtggtgaatccagaaaattgattcgtcggtatcgtaagtgtcatagtatgctaattatgcttagatcataatgttaggtccccatcggttggctttttttctaataagccaaaacggcttattaggaaataaaaataaatttataggtaaaacttttatatatgtgttctttataacttaaaagccaatactgaaaaaatactacgttgaaaatatcttaaaattaatctcaaaattaaatttgaaaatttaaaatttggcttattctttggcttattggaccatccgatgggagccttataatatgtggataagcaatttaattatagattttgccgaaagtcgtcggtgtcgtctgacaccggtcattatactgtacatctgcccctgtacgacacattgcaggacacattgcaggactcaaggcggtaaccagtatgtatcggataaagtttaataatattctttacttttagctaaaacagtaaacatatcatccatagttaatctaatctaatagctcacctatataataacaataattaactttacatatatactactcccccgttcctaaaatgaatctagaactggatgtgacacattatattataatgaatttgaaaagagacatacccagattcgttagactatcgcatctagtactatattagtttttttatgttactaagggagtacaccgttaatatggcacacatctctcccatattatttattagagctcatgctgtagctggctacaaacctataatctgtttttcttctttcttgtcttcacatatgatagatatgatatggtaatttgtataggtccacctatataattttgttgtattcattctttagagtcttagaatatacatacatgacgaagtaatccctacgtcccataatataagagattatgaatagatgtgttatatatgccgataatacgaatatggataggaaagctccacttatataattttactgtactctttctttagaatcttatacttcctctgtttcacaatgtaagtcattctagcatttcccacatttatattgatgttaatgaatctagatagtatatatgtttagattcattaacatcaacatgaatatggaaaatgctagaatgacttacattgtgaaacggaggaagtaatatacaaatatgacaaagtactgcctccgtcccataatataagggattttggagggatgtgccatatccgtactgattggacaaataaagcaagaaacattgcacaaaatccctaaattagctataccaaataatatgcgatttaacttagatcaatcaccggcctatactatagttggcaccggttcttattcttgccataagtacaaaatttacatcatctatgcaatccccggtctaatgtgcaaacatatactaaggtcactcccaaccctccatctaggatggtgtctatggcattaactacattaccatgtaggatttttagcttatgtggcactatattaattaagagagagagagtgaagagaggaagaaactgggtctcatgcaagacacagcttcaacacgagaatctatgcactaaacactatcaagttttgcattggaagagaatagtgtcttcataatagatgaagaataaatatgattggtagagaagagagatgatgtatttattaatggtccactttaagaaaaccatgggttgtaaagtctagtttctattgtgatgtcttattgacatggcaccataaacactgcttatggacactatgggttgggactgccctaatggctgtgttcgtttggtagtgttgggaactaatcttctgtgcacgggaaatggagtggttcattagcgcgtgattaattaagtatttacttctttaaaaaaatggatcaatataaatttttaaagcaactttcgtatagaaaatttttagaaaaaaaaacataccatttagccgtttgaaaagtgtgcacgtgaaaaacgagatatgtaagttgggaaagttgaggatagaactcagctggtgttaagtctaaaaggatggttgtcttagttcaatgtaactatggtaaaaatacctggccgcaaatcagtcatgtgcctaatctccaattcgacaaagatataacaacctatatccagaatatactatattttaatttggatggcgatcgtcaacatgcaacattgaccatcaccttttggtagacgtgtaagcaaaaaaaataacgaaaatgaatgacatgcaaagaaaatcaatactatctcaccagatatgtaatcatgtcttttttttcattgatcattttaattagttttcgacatatcagtagtcaaagttagataagtcttgagtcgctaatgtaatctatagcaccaatcgactggagaaattaatgagcaacaaccaacaagttagttttgtttatttcaatgttgccgttttgaaatagtgaaaaataaaaatatgcaaattatatatgtggccgtcctggccatgcatgtgttgaggccgcaaaaatggacacacgtgattctttttcccccaaaaggaaagaaaatagaagaaaaagggaaaaggaaaaacacgtgtgcagcgaccgtacacttatccttgaagttgaagttaagatcagacattagtacagaccaatcagcagctcatcagcatggccatgaacagaagaaaagtcattgtagggtgcgtgctgatgttctcttgtgccgttacagtcttacagatatactattagttgcttgcactattagcttgggcccgtatttatgggtgtttcttcctcttgtttggttgtctttgtggccttttcagcctggcccaacaccaaccccaacgcatgcaaaaagggctcgcaaccatgctaaagtggaaaggaataagtctatgttacgtccctcatgtcttgcccctggttaaatcgccttcctcaatcacaaaaccgggtataacgtctccctcattttcaagaactggtgtaaattgactccttaggtggttttgaaagtgattttatcgtacgtggcactcgtgagacccacatgtcagtaagaaaaaaaaataaaaaatttacacccacacatgttaatcatccttttattttggtttggtcacatctctctgtcccattctatctctctccctggcggagtcgtcgtctccggcgagcccttaccgatcgcttgcaacccgtcacgaacaccgcggcatatctgttcgctgtggccgggtcctcatcggggtctcctggccacggccccacctcgggtcagcccgtttggtgaccagatggttagcccattggctttgttgaaatttaatttatgccgtaaataaatcatgacattgcatatgtaaactagcatgaacgcatcattagatctacacatataaactaagcagtaaaatatgaacatatcaagtatgcgcaacatgttgaacttgtaccgagggtaccggaaaaccagttgctcagcaggaattactcgcggctgcgggcgttgacgaaggcgtacagcacgtgagcgaacaggaagacgagccgttgtggtcgaacagggagcagtcgcgcgaagcgcttcccaaaaaccttattgccgccttctcccggtgcaggttgtcgaagacagaggttccggagacctgctctcccgatcgccggtgcacgccgatgagcgggatggagtaggctacgagcgatggcgcaggacagaggaggaggcaaaccctagattgatttcatgtctattgcgtgtaggcggcggctcggtttatatagagaaaggtcgcttgatcagggcgcccgcacgatctccactttgtgtaaccgaaccgataagtcgcgtaacctaaaccctaaaccctaaacataacaaatccttttgttttcggaatgtttccaaaacaaacaaatccaaatttcccacagcaaaacaaaactgtaaaaggaggctgcatctgtgcaagggtgaggaaccaattttggcgaaccattcgacgcgtacgtcgtgcatgcgcgccgccatgccatgccaggcgaggcaagcgagtgcgtgcgtgttccccctcttctctccaccttacatgtttcaagtggctaggagagcatcctgccttttaaggaggtccccatgcatgccatcccatgaggtgggcttttgtgattttctaaagaattaatcttcgagtgggctaaggcccatctattaattccaacaattccccaccaaatctcaaaatctcactgagatttgccttttccaatgtactgtttatatatcagtggtttaatggagaccgattaaggttgaatatccatctagaactccaagctacacttactcacaacttgaacaaaggactatgcattgaattgcaagtcttgtgcaagcaagttttactcagagttttatctgatactagaccgtctgtagactacccctcaggtggagcgtataagtcatactctttggtcttttagtaagcttcctagaagattcacccaaaagctctatagactacgaccaacagtcaagctcacaaaggagagttctttcaagaatgctctgcaggacaacatcttcgctaattaaaaccaacagaactcattaaggcatagccaacctgccttgcagctcacgagagaacatgcatcttcacttagagagggtttatattgatactctccttcagttaactaatggcttgttctttccaggacctaattcacgggatctccgatcacatagactgggttaccaccatagtataactcacatgggtctcaaacccatctccttcgatgcattgtcaatcacatttcgtgatagtcccttcgtaaagggatctgctaggtttctagctgtttggatgtaatccaatgttatcgtcttctcacatgtctagacgacttcatgttatccttaaaactgttcactttgacaattacagtttgattgtcacagttcataagaatagccggcatcgatttttcaacaacaggcagatccatcaatagatcacacagcccttctgcctcaatagtagttgtatccagtatcgtcagctctgcttccatggttgacctcgtcaaaatggtctgtttgcaagacctccgtgaaacagcaccaccacctagtgtgaagacatatccactagtggctttgatctcatccacatcagagatccaattagaatcactatatccctccaataccgcaggatacccagtatagtgaagccccaattccatagtacctttcaaatagcgcatcactcgctcaagcgcacgccagtgatcatctcccgggttagaggaaaactggctcaacttgctcacagcaaaggagatgtcaggcctagttgcactagccaggtacataagcgagccaatgatttgggagtattccaattgatttctagcaattatcttattcttgcgaagcaacaagctaggatcataaggtgttggagaaggcttgctatcaatgtagagaaagcgatttaagatcttctccacataatgggactgcaagagtgtaatcccattgtcccctctaattagcttaatgtttaggataatatcagctactgccaaatccttcgtatcgaaactttgagacaaaaatgatttaacctcatttatcacctcaatgtttgtcccaaatattagtatgttatcaacatacaagcacagaataactccctcacccccaccatagcgatagtatacacatttatctgcctcattgactgtgaagcctgcagatgtcaatgttctatcaaatttctcatgccattgcttaggagcttgtttcagactatacaaagacttcaacaatttgcacactttgccttcttgaccttcaactacaaacccatcaggttgatcaatatagatctcctcatctagctctccattaagaaaagctgtcttaacgtccatttgatgaacgagaagaccatgtgaggctgctaggaaaagtagcatacgaattgttgtcaatctagcaacaggtgagtaagtgtcaaagaaatctttgccatctttctgagtatagcccttagcaacaagtcgagccttgtacttttcaatagtaccgtcaggcctaagcttcttcttcaacacccacttgcaccccacagatttgcacccatagggtcgctctgtcacctctcaagtcccattagcaataatggaattcatttcactacggacagcctcctttcagtagtctgcatcaagagatgcatatgcttctgaaatcgacttaggagtgtcatccacgaggtacacagtgaaatcatcaccaaaagacttaaccgtcctttgtctcttactcctccgaggagtttcactgtcatcctcctcaatgacatgttcacgcgtatgttcattttgttctggttgtgtgattgaactgggaattatttcagagggttggctagaagtactatatgtatccttcattggaaaaatgctctcaaagaaggtagcgtcacgagactccataattgtaccaacatgcatgctaggtacctcagatttaactattaaaaatctataggcaacgctgtgatgagcatatcccagaaagacacagtccacagtcttaggtccaagtttgcgcttcttcattattggtacattgactttcgccaagaacccccatatgtgcaagtaagaaagtgatggtttcctcccaatccatatctcgtacggtgttttgtccttatttctgttaggaattcagtttaacacatgattcgaggtcaacaatgcctccccctaccatgtcttaggtagtcccgcggtgtccaacatggcattcaccaagtcagccagtgtgcggttcttcctttcggcaatcccattagactcgggagaataggaaggcgtcctctcatgtatgatgccatgttcctcacagaataagtcaaactcatttgagaaaaactctccaccacaatcaaacctaattaagtctttttatccttctgtcaagttgattttcaacttctgtcttataaattttaaaatagtctagagcctcgtctttcgttttcaacaaatacacatagcaaattctagtagcatcatcaatcaatgtcatgaaatatcgttttctaccctttgtcaacacccattcatttcacatagatctgaatgtaggagttctagaggtgccaagtttctcttctcggcagccttgtgaggcttgcgaggttgctttgattgcgcacaactatggcacttagaaccgttgacaatggaaaacttaggaattaaacacatgctagaaagccgatacatcaagccaaaaataatatgacataaacgtgagtgccaaacattagcctcatcatccacactgccacaaatttggttcacagacttattgcggaaatcagaaagggaaaagcggaacaggcctccgcactcataattttaccaataaaatattcatgtttagacacgactacattattagactcaaaaaccaacttaaatccatctctagtcaaacgggagccactaacaagattcttgtcaatagtagggacatgctgcatgttcttcagctgcacgatctttcccgaagtaaacttcggatctaccgtgccaacaccatgaacagaagcatgtggcccattccccattagggaggtggaatcctgtgtgacctgataagaagaaaacagcgaaatatcaacacaaacatgtacattggcccctgtatcaacccaccaattagtagactggttaattgaaaaaacagtaggtaaattaccatacctgcttccttctccagtgttaccaatggtcactttagcagacttggaagtctgccctacaggtgcctttatccccttgcgttgtggacccttcttggccagatgaccagtcaaggcacacacaaagcaagttctctcatcctggttcggattgctattgttcttcttttgcttcttgaagttggtggtctgctgagctttctattttcccttgctcttgttctgggccttgtacataacattggcactggactgcccaccatcgcccttagacgtggaatctttttcccgagctttctcctcaacatcaaaagacgctatcaacccttcaacggagtattcctgtctcttgtgtttgagtgcagtgtcgaaacctctccaagatggagatagtttctcaataatgcacccagccacaaatttgtcgggtaagacacacttaacgagttcgagttccttagccatggtatgtatttcatgagcctgctcaactacagaacggttgtcaaccatcctatagtcatgaaactacttcatgacgtacagatcattgctagcatcagtagcaccgaatttggtattcagtgcatcccataactctttagcgtcggtcatatgcatatacacctcgactagacgatcgccaagaacgctaagaatgcatcccataaagagagtaatggcctcatcgaatgctttctgctggtcagcagtaagaactcccacaggtttgccagtactcgcctagaagcatttcatagcggtcagccacagagtgaccctgatctgccatctcctaaagtgcacaccggtgaatttatccgacctcagtgcgtcggcaaaaccagccatagtaaaaccatagtgcataaaataaggcttttgggttgttaaatttataagcacataatgatttaatttattccataaataaatcatgacattgcagatgtaaactagcatgaacgcatcattagatctacacatgtaaacaaaccagtaaaacatgaatagatcaaatatgagcaacacgttgaacacgtatcgatggtaccggaggaccggttgctcagcaggaattactcgtgattgcgggcgttgacaaaggcgcacagcacgcaagcgaataggaagacgagccgttgtagtcgaacagggagcagtcgcgcgaagcgcttcccaaaaaccttattgccgccttctcccggtgcaggatgtcgaacgcagaggttccggagacatgctctcccgatcgctggtgcacgctgacgagctggatggagtagactacgagcgacagtgtagtacagaggaggaggcaaaccctagattgaattcatgtctgttgcgtggaggcggcggcttggtttatagaaatgtcgcttgatcaaggcgcccgcacgatctccacttcgcgtaattgaaccggataagtcgcgcgtaacctatccggactccacgccgttttcacgcaccggatttttcgaaatgtttccaaaacaagcaaattcgaattttctgcaacaaaacaaaactgtcaaaagaggctgcatctgcgcaagggtgagaaaccaattttggcggaccattcgacgcgtacgtcgtgccgccatgccatgcctggcatggcgggaaccaattttggtggatcattcgacccatacgtcgtgcacgcgtgccgccatgcagtgccaggcgaggcgagcgagctcgcgcgtgtgttccccctcttctcttcacctcacatatttcaactggctaggagagcatcctcccttttaaggaggtcccccctcctaaaataagcaaggtggtactaaactccccatgcatgccatcccatgaggtgggcttttgtgattttccaaagaattaatcttcgagtgggctaaggcccatcttttaattccaacaggcttgcccgatgttgtacagtgccctcgcctctggacccactgccttgtcgacgtgtcaccacagctcgacggcgagcaccgtggtggtgaggatcacctgctggaagttgggagcagagccacacgagcgcgaggacgcggtcgccaccgcgatgtccctctctgctgctgggtttgtctccatggcatcattgtgtgctaggatgaactccttcatgatgggctgctggtgctgcaaggcgactgggtggccttctccttgtcgttgtcattgttctcccccaacgccaacctcctcaggatgatgaactcgagcaccaccggggaaggaggtggcatcgagctggacccctcctccgcgggcagggcacgaccatgcacgacgcatccgcgttgagcaccgacgactccaagtctccaacatgccggagtcgctccacgccgccgtctcctacttcttcggcaccccttacactatgccattcaaatctagctccatcatgaggaagcaatcaatcagaacactttcgctagagccaatcaaccaaaccaaatcaaacgacgcaaaccaaaatcattgcagcaacagctagctcaagtcacaactcgctagagtcaaccgcaatcgatctcaacacatatgcttgaattgcatttcgtggcgtggagtctatttcaagaagaagaaccatatgtggaagaggtagaagcaagaagagggttgactcattcaccgtgtcgtcgcccgcgcgccgcagtcagccgcgcacgcggggaggacctggtctgctgcggcgcgtggggggagaagaacgccaaccagctgcgcacaggggaagaagccgttgtctgtggcgtgcactgggaggagcacgccgaccaatacagcactactatgccggtgtgagagagaacaagagaggggatgaccgagatgtgggattgttaatttttttaattttttttcactggcaagtgggtcccatgagcgccacataggatgaaaccacttctaaaaccacgaaggagtctatttgcactggttttcgaaaatgtagaagacattatacccggttttacttttgagggaggcgattcaaccagtgacaatagatgacaaaggtaaaatagacttattacaagtgaaaaaagacttacttgagctttgtacatcagccaagtccgaggggtgtgttgacggtcgttatcaatcagtttcgccagtctatattatcttaataaatgagaactagttatgcttgcaacgcatatttgtgttagaataagaaatattccatttgcactaggattactaacctcttgcagataataaatattaaatggaggcggatcgacagcaaaatggacgatcaatcaatcggacgctgtcaggaatcagacttgcggacaagtgggctggaaagaccaaattgacacgaccaaaatggcccaaagttcacaagtctgcaaagagaagaagtccaagaggtcgccagtcgaacatgggctggattggacaatcccatggttcgaccgaacctatctttgcaccgttggatgcagggttgcggctggatggtgtggattaacccccaatgacggttggagggtatttccgaccatttcaaccgtcacaaccatcattgggaggctatataaggccttcacctcctccatttcaccgcacatctcaagcaagaagcttcatacatttctcaagtttagtatagtctctagagtatagtggaatagaaatataatagaatcttcaatcctcggagtcttcggaagagttctggtatggctctagtagcttttccttcttttgtaagacttgtactttattagaatattcttctttatactactctggtattgtattacttttcgagtttatgaatactaactttactatatatccaagtcatattgattatgatgctagcttatctaggaaatgcaatggtgtgggtataatgatcgtgtatacgatgactttatatcatgatgatgatattagagtagtatttggtaatttaagcgtagtgtttagattactagatgtcattatttggggttatatgttgcggaagcgaagtgggtcactgatggtgacagcttaatacgggtattcctccgcgcgtgtatatagtcctaagttactttcctggggagggtactcctccgtatttagccccggttggatggtcatgacggattgtcgtaagaaactcggcaatcaggggtggcttctcgaaacaccaggagggcattggaaagagggtattaggtaagtaatcatataactaggatgtatgtataatatgtatgtatactagaagtataggaacaagttctttctaccttctttccacttagctcagataattatgtatgagagtattaatgcttctgcttagtgtcactctaccctttggattacattaacccctgtttagactttggttattacaagtaacataaattattagtatgtttctctctattataatcttcccacgggattaaacaaatacgacacccttagaatactctcgggtgaaatgctacaatggcgtatccatgcgcttgcggatgaactctgtaaccataatataccaggagtatttctgcgccattgctgggaattatatttctaataatgtcgttaagaaataccaacagcgtgcatcacgctgcacccttgtgtgcgggccggttgatagggtcgccacccctgcccgttccccctccccactctactccttcgttaccttgcactcctgccaccattgtagctgccttgatcccccggtcatcaccatgccacacggtcgtcataactgccattatgcacaatgagggcgaccgcagtggaagcgtgacagacggccctatgtcctgctatgatacaatgttgaatgctagaggaagaggaatactgctaatattggacacgttgtatattaagcctcaggaaccaatatatagaggagtaaatgtagaggagataagaacgaatctagagataataaaggagtccatacaaataaatcatatcttaatatgactctaactaccacactgcataattaatttttcttgatgaggccctatttaggttgcaagtggaccataattgctcccacttgcaaatatcactcctttgggtcggttcaagggccgcatgtgaaaatgctttttcgtatgcgacctcttaagagactcgcctgagaaaatagaattatttttccagatggacctcttaagcggtcacatgcaaaaatcagattttcgcaggcaaatcctttaagatgccctttacgaaaatcactagaaactaaatataaaaaccaaatcctctccaccatctatctcgaggggtggaaattttccagttgaggccgaggtgggggaaatttctcacccgcaggtgagcggggtcgggggcggggatgggagttgacccgtaagtgacccacagggcctcgatggtatgagttacatgtcaaaagatcgcacattctaaggtccatttggcccattaggggaaggactacataagaaaaaccctttcttttcccaaataaagccgccactctctcctctctgactcgcacatcacttcctcctagcgcgccgcccctagccaacctgcctcttcacgtgccatccctagttgcaccatcccgagttggtactacctcttccgcgtcacctctggacatcgccgccttgtcatagcgcgtcgcccccaatcattgtcacctcctcacagtccatcgcccttggccagcgtcgcctcctcgtagcgtgctacccctagccaacgccgctaagagtaaccccctagggtttctcccggtgccctttatatagaactagggttatggtatcccttataatccagatacctactacctatttacatggaatatgattgattgccttatcctctatctcttactcaatttacaagtgtgctgcatgggcctaggactctcggcccaccctatgctacttggcccaaagccttaccgcgagtacccgagtaccgtgtaccccataatagaggaccgtggaatagacatggtagaaatttttggggtctatacttccatcgtatgttgtacttcatgataggtccttaccttacgcaaggaagggatgaatgccttgtggcctcccctaggttgaaaagccgaacggcggttatcatcccgagaaggtctctgagaatgtttgtctgacttttgagatgataatggagaggagggatcactgtggttaggtacgacttcccgaggacaacatcctttatcttcccgaggacttcagaatcttatacgttcataactcccgtgatagctgcgattctcatagttgccatgatcttcatggggactatgattctcaccgtgatcacagtcatctttatatgtattcagttgtacgaccgatgtttattgcgatcattcttgtcatagttattttgtttggaacaattgcttatttgaccctattttgaagcccaactactaatctgaccttactttttcaagtttgcttatttgaccttgtttctcaaaatttaagtttccgtttgaccctgttttcccttcaccattagaacatcatttagaaaaaataaatactacccccaagtgaccaaaatacccctatattactaattaaccctatccccatcccaatcctcacctctccctagttttttgtcgccggaaacagcgagtgctgcggtcgatgaggctggagggagcggcggcggcggcggcgatggccgagcgccgatggagcgtagcggcggccgctcgaggagggagcgagcagcggcttcggcgcacggaggaagcagtggcgtcggcacgcgggaggagggagtggcgtcggcggcggctgctgtgctcgaagcggagagagggagcagtggcgtcggcggcgactgtctggctcggagcggagggagggagcggcggcggcggcggctgttgggctcggagcggagggagggagcggcgacggcgggtgctagggtcggagcggagggagggagcggcagcggcggttgctgggctcggagcagagggagggaggggcaacggcggcatgcgggccctcctcgtcgctgacccgacacttcccctccaccgccgctgctggtgtcgctaagccgccactgccccttcgcagccaccaccggcgctcctccgcagctgtcagccctccgtagttgcccccgccgcagttcctccgccgcaaccgccgctcctccctcagcaaccgttgccgccgccgctcctttgccgccagcgacggccctcctcatcgctggcccgacgcttcccctccaccaccgctcctccctttgcccctccgcaactgtagccgccgccgagccgtcgctcctcctgctgcccctcgcagtggtctcgtgagagagagagaggataagaatgaacaaatgagtgatagacaaatctgtctcaaatttgttaaaactatgccaaatttaacatggttaattgagcaggggtaaaaaggacaatttttctcttagttaacaccgttatctatccttcacaaaataggtcatctctgatctttagttttaaaaagcagggtcaaatgagcaaacctaaaaacagggtcatattggtagttagacattaaaacagggtcaaacgagcaattgctccattttatctctcctaatcaaatcacaaagaagaaaatagtgcatgacggtgtttttcgataaatatacatttttcggtagtacgttagtctaaagatttacttttacggtgtcatataagtaaaattttaaagttaggtggtgtttgggatggaagaaacttattataggaacttatgttttcgtgagagagattaaactatcccaaacaccaccattgtgtaaattttgcctttgtattcggttaattttttttttgtctttttggatgtcctaccaggggccaatcgtacactgcctgctcggaaagagagaaattggacattctgccactgctaagagtgggtttcgccacaatgccattccccgaaatggcatcgttaaaatgccactgccaagacttggcttacatttgttttgccatttgagccatttcactctatttccacctaatttctcacccgggctaccttgggctgccatcgtcgcagtggcagtgccggcggcggtgtgccgcgatgacgagggactaggagaaggtgtcggcgaaggataagagcggggcggtgacgctggccagtagcgaggagcggcgcagcgccgatgagtatgcttggcgcgcgtctcactctgctctctcctcaacaagcacaagcatggctaccatcaatggcgacgccgagctcatcgtggcggaggccaaggaggaagaggaagccacccacgacggcggcagcgtgcactcctagtggctgcgtgccgtggtgctgggtgccagcaacggcctcgtctccaccgcatcgctcatgctcggcatcagcgcggcgcgccccgccgacaagcgcaccgtcctcctgtccgggctagccggcctcgtcaccgacgcctgcagcatggccatcggcgagtacatctccatccacgtgtagctcgatgtcgagctagacgaaatcgagcaccggcgacgccacggcggcccggctccggccctggctctggctagcctgtgactgcaagcggcggcggcggtggcggtgtcgcgccccggccaggccacggccgcggcgacatcggggacacccgacgcctgttgcctccaggttgcagctactgctcgagctccctgtggcgtggatctagcaccgccggaggccatggtggctctgcagcagaagaggtcgagcgcggcgcggcgcccgctgcaggcgtactacctgcgccggctcgcgtcgtccccgcttctctactggtgtgtggtgaattttcagtgacactactggtgtgtggtgtctattgatgtctggcacctgaatttgtcgtcagagaaactggaggttctcatctgaacttctggacaccaatgccattggcttgcatgtcctgcaccaggctcccggctttctcgtctcccagcgacatgccgtagatggcgatcatggtgttgtacgtcaccacgttcggcttgatgatgctgccaccgcggtcgctgccatcggaggcggcgctgcgcatgaggccgaacaggtgaaccgcctccccgaacagcccggcgtcgccgtacacgcggagcatggtgttgtaggtgaccacgctcggggcgacaccagcacggcgcatgggggagtatgactccgcgtccggcgcgacgccgtcagagggcatgtcgtggaggaggagccggttggtgtcccggagcaggtcggacttgcagtacgcggcgatggcggcgttgtaggccttgaggtcgggcttgatcccggcggcaccccgcgccccgaagacgggagaagagcgcgagcgccttgggcgcgtcgccctcgcggagggcgaggtggatgaggttggagaagagcacgaggtcgggagccacggcgtcgtcctccatgagtggcagaaaggtgagtgcgtggtcgaggtggcccgcgcgggtgagcgccgcgaggagcgtggagtacgagaacgcgttggcggcgacccctctgtcccgcatatccaggaggaggccggaggcgaggcggagcatccggcgcggcacgtggagcagagcaggaggttgtacaggatgaggagcgcggaggtggggaggtctggcgcgaggaggtcgagcagcgcgacgccgcggcacgcgtcggggaggcgggagaggagcgtgccgaggaggcgcggggagacggggcggtgcggggagagcgcgggggccaggtcgtactacctgcgccggctcgcgtcgtccgcgcttctctggctcgtcgtcgagtctggcgctgcgacacggccgctcctcctccatccccgagcagcgccgcctcttttgttcgccggaggagaagaagaaaaactgcaggagagagagaggggtattttggtcagctgaagtgggaaaaatggtgaaaatcttgtgaaatggtgaatatagcaaagcaacggtatggcatcggttggaaatgacattttaacgacgccattccgggaaatgtcattgtggcgaaacccactcttggcagtggcagaatgtccaatttctctcgggaagatggaacaagcgagtagggatggcaattgtgcccgtttgcccgtttatccgtgggtaaaaaccctattagggttgggtttgttctctattttatacccatgggtatcttattgggtcaaaagctatgcccgatgggtaaatgggcatgggtatgggtcatcactacccatgcccgctttgcccgtttacccgcgaaatctaatttacatgtaggcttggagtaaaattcactagaatacataagccgtgttctttgttttttacagtttcccttttatttctcttattatttctctcttcttactctatcgccgctagagaagagacacgagatgttttagaagcttatagactttttgtcaactgcttttgttgtggtgggtaaacgggcacgtccgtgggtataaggcgtccacgggcaatgggcatgggcaaccatccttaccctttatgtagtaattggtatacccacaggcatagataatctcacgggtatgggtaagggtaggcactacccgtgcccgtcgcacccgattgccatccctacaagcgaggtaacgcaagaatcccccatcaccaaaacccagagacttctctcctcttgctcctcctcgacgccatggcccccagatcggacagcgccaccggcggcgcggccgccgcccaggcccacggatccgacttcgactccatagatcccctcttccacgtcctccgcgtgctccccttctccttcctccggccgccgcgcacccgcctgaggctgccctccaacctggcgctcccctcccccatgaccgtcttcgccctcatcctcctcacctacttcgccgtcgtctccggcctcgtctacgacgtcatcgtcgagccccccggcatcggcagcgtccaggaccccgccaccggcgccgtccgccccgtcgtcttcctccccggccgcgtcaacggccagtacatcatcgaggggctctcctccggcatcatgttcgtcatcggcggcatcgggatcatcctcctcgacctcgccgtcgaccgcaacaggccccggagccttcgcgtctccttcggtggctccggcgtcgccgccatcgtcatcgcgtacgctatggccatgctcttcctccgcatcaagatcccgggctacctatggtgaggaacaagcttctttactttgatcgttagatcagatctgtaacaagattctctacctctagatctgtttgctgttgctgaggaactattgcgcttcctaatgatgttattgtaaaattctggatgattttgagtttaaattagttatctgaagattatcgttttgaaatagaaataaacacggccttacatggaaatgtgactgcataaaaatgctgctatctctatctagttctgctttctgcttttgattggagcagtgtagtttgggataattgctagatgtctagcaacgagtttttaactaactgtatcttagactgcttatctcgattggatattttttggagatagggaagttgtgataactttataaattataggaatgaggtgggaactaagtgtataactttataaattataggaatgaggtgggaactaagtgtatcttagactgcttgtctcgattggattttttttggagatagggaagttgtgataactttataaattataggaatgacgtgggattgcctggatgatatgtttaggaacgataccgaaattatggaaaaccaatttcctacaagatgatgtaccttgggaactactgtatgctgattaatttcaacttcatagatcactcggttgagattttgaatttgtagtggtaataacttttttgttcaggttttacatgatattgtgaacctaccgttttatgtttgatttttataattcaaactctaaactttgtactacctccatcccatagaaaatgaatttctacctttgaacctttgtcccataaaaattgtatttctactaatgtgggatctagcaaattgattacatcaaaatacatttccttgtaatctccattccttccatcacatctctaacttgttgtcttaacattccttttaattaaatttatatatggaatgtgtgcatgtattgtgttcaataaataaggttattgtggtcatttctctatcctactaatctgtccttaattcactagtagaaatacaatttttatgggatggaggtagtagtttattagggatttatactggtcatatttgcattttgaatgcttgaaattggcttgctgcaaaacacttttctcttaacaagttaacaatggtttgaatattcctattttcactttatcatatgctgtcctgtctgtgttccctgctattttcaccttaccataacacttttgtagtgctagaacctttcatacaaatatccatgctaatatagattatgttgtgcttttcaatttgggttaccagtttcttgggttagttactctctttctttactagcataggttagatttttcaagcaataaattttaatactgtgccacgaagtttctaatattaaccccagattttagatcctcattgaagaagggggaaatgagtgtaagcagcttctaggctttggtgctctaccaaacatttttgtgggaattgtttcatgagacaattataagctaatcatctgatgtccatagtagtaaggcaaaagggtgaatgatatgattatgagaaaatagacctttgcagagaaaataaaatgtgagaaacatatatactaatggaatttgtgtggagctatggattagttctcagaattcttgtactgtgcatggattttgttggattcacattctagacaaaaatacagaatttctagctatgtattattgtgctttggacagtctatatgctatattaacgttttttgttgtttgaatgtgagttatcagaaaaattgatactctagaacgataacatgttttcctgtcaaagggtggctatactttggcatgagttctatttggaaaaagtcaaaataatttgtgcatacttctacaggaactttaatatattcaggcaggtaacagaaacaggagaattgcttggttcatttaaatgataaaaccagtttccccctacctttgtaaaataattaaagaacagattaagttaacatgtcgatgaagtaacatgtttcagattaagcttggacattggagttctgtttatttcattgacgtaacactgacccgaggagaaagtgtgtttgttactcttgttattgtagtgttatagacttgtagctttggtcttgagaaacaaatacgtgcattgccttaagaaagtatgtgcagatatagcgtgtttccataccaaaatgtggttgaaatgaaagttttaggactatggttaattgcttaccttgtgatacttgaatgaaagtttagatatgtatacccgttcttttttcctggcaatgcatcgaaacgcatgtactttctaatgtgctctaaatggttacatgtatatacgaaaattggggaaaaatggtcctatgagatcatgtctattatccatcacgctaggcccctccaattcatgacaacacaattcttaaagcgcccatcccatcagctgctctctattggcctatttgattgcctgcaccgcttcattctgactcgtgcatgtcatccaggatggtttgagcctggttgagtggaagctaagagggttagggtctgttttgttgcctgaaccatttgaacctggcccttactctacgtgtcatccaggatgattttagcatggctgagtagatgcaagaaggctatttggttgacttgattggttgatcctgaatgtggtgagatgagatgtttggatggatgtatgaaaaatctttgcgtgcatgagattttgtttgatatgtacaagtgctgagtttcttacctctccattttaatggtgttggagtacatttaatcacacgtataaaagggcatgtacaatggtgtctaataacgggctctcttcattatcatgcaagtaaatttagtgatgtggaataaagagagagaaggaatgagaaatatcgttgctacgcatgagaacggcttaaagttgatttttagcatttattaacaaaaaatttgttgcatgagcgtagagaaaaggaaagaagtataataaaaagttatttagtgcattaatgatttagaaaccttatagtctcctacaatactactattgtaggaggatagtctctaatgacattgattagtataaagagctaatattactctatatttgtatatgccctaaagaaattgttggttgatggaatacttcttttttaatatagaacgtcattaacttttggatatacttattatcttgtgtcttattaaaaaatttatacatatataaaaaatataagtcatgattaaaatagtgctaaaataagtctaacaaaaaaataatatttatgtattttttaaacaagacaaatgattaaatatttctaaaattcaattacgtcgtgtatattaagaaaatagagagtattatgtaatggtctgtgtatgcgtatagtattcccatataatcgggaaaaagaaccaccacatactcctagtgccacaattggtgcattgcaacccagccacttgaatttcttccttatgtccagttgtgatcgtgcgccattttcttcgtgccgaccatcggtgacacaggagaaatctatgctcacccgtaccgtcactacgtatatatggttttggtgatccgattaatcccatatatatataaaagcttttggtggactgctagctgccattggcgctaaggcagcgtttgaaagggtgagagagtgagtttgtttgtttcgttttccgtgcgtacgttttctaaactactaaacggtgcgttttttaaaaaaattttctatattaaagttgctttaaaaaatcatattaatccattttttaaatttaaaatagttaatactcaattaattatgagctaatagcttacctcgttttacgtatcttcccagtccccttaatcaccttctccacaaacacaccctaagtttactttcgtgcttgttgccatcccccatcctccatattcgttggcgcagaaccaatatggccagctatacgcgactcgtgctctttcacgctcacaaggtaattaattggtcacagtataatccagaggtttttatcccaatctggcaagtgaaagggcgatattgtgtgccaaaaccagggcacgtacggccggtatagagaatgtgtggctggccaatcaacacaatacccagcaccctgttaaaccgatgatatcgatggtggcgcacgtacagtgcggagacgtgacgggccttgcgcgcggttcgtggcggacggccggaagggatcgagagacgtacgtgcgacgggccgcgtgcccgcgtgcggtgcgcgcactggcgtacgtacgacgtcccccggccggctggatcgatcgatcgggccgctccatcaccacgcgcgcgcccgcgcctgcgtgcaggtgctactacggccgcatgcactacgtacgcctgggtgggcgccccgctgtgtcgcactacgtactacgtatccaccggcacggatagctacaagacggtacgcacaacatacgcatgcacatctcgttattagaaagcgcacactctgacgtgaactttctcttaacttagtcactgatatatatattggcctgtgaacgatggaaaccacgattcttctaattaacttcacaatcagatagtcttaatccgtctcgttgccgcactacatcgtgcatttgccggccggccggcgtacgtacggtggaatcaaccgagaactagctacgctcgtactcgatcggtgcgtgcgcgtgctctgtctctcgcgcgcaccgcgcaccgtgtgccattcaattcgccgagtgctgcgggtgcactgtgctgtgcgcgagtgggctgtgcatgagagcagagaaaaaacggagtgaagacacaatcgaaggttctagacatggatcatgcatggatgtggctgctagctagtagcaggatggatttggccgtgcacccgtgcgtgcgcgtgtgcagtgcacggtgatctcatctcaagtcccgatctggaccaccctagctagctctacgtgatccttccaaccatctgcaagcatgcagtgcgtgtgcaggtcacaactcacaaacagagaaaatgatcgaggcagtgccagcggaatcgaatccaaacaaggacgcaaacattaatttatttcgagacgatcgagttgacatgccacgatcgatggagccatcccgcgtggacgtcggcagggatcgatgtacgcctccattaatcggccgtagtactactcgtgcgtgcaacggcgcaactaatagtggcggaagcacccacccatcgtgcacgcgcgcgcgctatccatctgcactgcactgcaaatatagtggccggtgtggatggaggcatgcacgcacgagcggcgcgcaccgaggatgcgatggttggatcgatcgatgctatagtagcggccggccggtggaaatctcggtagctcgatcgcgtcgcgtgcgcacgcggggcgctgatagatagatggatggtcgaccggttgaaatgcggggagctctctcgcgccaacaaaatttcctttcacgagtgcagagcagtgcggagagctttcctggatcactcgcacgagtacgtgtgtttgtagctagtgaaagaagtgacttttaattttgttaggtcggcgtagaatagatgcgaacgcacatagcgctgcacgatgctagctggtgccattttggtgtcgtcgtggctggcgccgaacgctaactagcatgcgtgcgtcctgtgctcctgtggaagaaatggaacaaatggatggcatatacatcggtcgtcttttccgaagacaacctgcagggcgcaggaaagggctagtggaccacgatatcgccaatcggtgttttctttttctttttcccaattattgaaacccagatttatcctaatatatgcatatgcgtccatatgtcaaatagaaattctcaatcagaaaaactagaaattcctgtgttaataaaaaaaaggcaacatcatattgtcttcatccatcgatcaaatctaccattgaaatcttacacacacacacacaaaatgagtttattaaattcataaatattaaatatctaattgtattattctttttgaaaatgcaatattcatccatatgaacacacacatgcatattctaaccctaagaacacctctgaaagactaagcagcatatatttcaagattaacaaaatcaccgtacatacatcttgttgccgacaaacatattgcctactacttaaaaaaataattattgagcattgttactgagtcaaaaacttacctcaagtatttatctcaaaatataggtaccttctgaatacgaaatttgttctaaaaatatagctctacctacctcctcatcttcacccatcacagctatttccgtatttaatttctccatcggcctactcatttcaacctatgacaatcatccttacttaattttaccccttctccttaatctttacatataatctaaacaatctaaagctagttatattttgatacgaagggagtaggtaggttctaccacaaagattataatcaacttctaatgggctcctaattgttgtttttcctggtttagaaatcgtaaaacctgaaactaataaatataaagttgtacttggtctagagtctttatatatttttgtatgatttaataattttgaaatttataattaatataaaccaagttgtactcggtaacgaatctagaattcgaaattgataaatattgggttgtaccccgcaaataaatatattgggttgtacttcccaagtttcaattagtgtttttatggcttgatacttggaaaatagatattaataaatgctgagttgttcttagttgtaatctgaattataatatatccatgacttaataattctaaatgaattaataaataccacgctgatatatatataaattatttaaaatatgtagtacacatgcccatatatggctagtaacaatgtactaaatacctatacaagtatgcaaccataagtttagacaatgacaacttagaaaagagagatacaagattatgcaaccataagttcatacaatgacaacttaggaaaaggaggtttgtataattggagcaaggtggcgagctggccaatgtagacaataatagcacttggttgcacttagtgtcacagcactacaaatttataatcgtatatatagatatggaagacaaatattaaacagagtttattaaactaggaggggtaacgactaagataaaccaaataatctaatgtaccattcaaagatgacaaaagaacaaatttatatgcaattataagggttcatttcaaacgcaagattgagaaaacaaagaaatagaaatagaagaagcataagattttgacatgaacgtaagtacaaaataaagaattgtaaaacataggaattcgctaaacataggaatggtcctttgattaagccgcaggaatcgaatgagagatatagatttaaaaagaaatgttcctccaaaatcgttgtaggattatccatttgattcaatcttttttccaaagacctttgtacgaattttttttctatagtattgaaatcctccaagtttcaaaatgttttccaacaaatcaaaggaggcctaagctttgaagtaaatctaacccaaatatgctggctattgtgctagatcaaaatacaaatatatactcccttcatgtcgctactctgcgagtactttttgctcatatattgagctgagcggtctgacaaatagagttcatctctccctcccccctttctctcattcatccacagcaaaaaaaaaaaaaaagaaaaagaaaaaaagattgtgtcgtaaatcgctactgtttgggtggagtttcctcaatagatgatgtgtttagttcgcgctaaaattaaaagtttggttaaaattaaaatattgtgatgaaaaagttaaaagttttaaaaaaagtttggaacttaaaaaaaaaggccaggagtcacatctttaaagaacgaatgaacgaggctcctgactcgctgaggtaaccaaagctaaaatattggttggtgtactgtagcccgaccgatacggcctgatggcgatgtagaaattgtcaactgttacgtgaaagcttgggtcaagatcgtggcactcaaagcatgcagaaagcctactagtacgccaagaaacatatagcctcttgtccaatcattggccaagggaattaatccctaaaaagctgcttactactcgtaaacccatcctctgatctgaacatcaacaagcaaatgacacgctactcatccccgtgctttaagaccagatccatggagttaattagcaggaacaactaatagttaatgagcatcattaggacaacttttaccaagcatgcatcaagttgacattgctaaaccccccttttcccgtgtgggattcgagcactagctagctagaacaaaagggggcgagagacggccgggatgggatcgatgcttgctcgatcacttctcgccaaaaaggcaggctcccgctagtgccaaccccaacatgaacatgctgtgcattacacaagcaagcaaagcatgcacacaaacatatacccacgggagacggggtggcaacgtgccatcgccatcatgagctagcagcacacccacacatcgtcacaatgatggcatattgagagtgtaagcaccagcagtgcatccatccatgcatgcatggatcatggcatcatgctagttcatggatcgatggatggagagaccaaatggaacaagacaaaggcagaaacagtaaccagtataactgaacacgtcaagctaacgaaggaggggatcatcaatggataattcatccagcaggggaagggggggccacatggcaggggcagaaaggaaaaaagcaagcaaggcaacaaatgaagaggagtagtagcagacaaagccaaagcatgcaaatatgcgattgcaatgctgcccttctccctctcctctcctctgcctaactagaactccataatccatatccatcatctctccactactactatagtacacccaaagcaaatgagcactagctagtactagtagtacattgatgatgatcgctgcctctcctctgccccctcccatgctccctctctcatcatggacggagcataaagcccgtagccaaaagtagagcgcacaaaaagagtttggccagatcatggcactgcgaaaagggcatcaactagctatggctagcttggcgatgccaatgccgacccaaggcatggagaaatggaggatgatggagtagggtacatgtcgtgcatgcagatgcagtgtactgtcagtagtagcactcgatcgctgctgctgactgctggtgctgttgctgccgctgcagctgcctctcttttttttttgtttgtttgtttcctccgttctgccggtgttggagatgatgatgatcagttgtcggagccgcgcacgccaagcttcttgacctcgaccttgagagacttgaggtaccggacggcctcgtcgagcacggccggcgtgtccatctggttgccgccggggataatgcccttgagcgtccgcaccatcttcttcatgcgctccttcttgcgcccgggcctcgcctgcccgccgccgtagctggacgagcacgtcgagtccggggagctgccgtcccggtaccccggggtgcgccccgtgctcaccacgtcgtcctcgtcgccgtcctccgagctcagcagcgcgtcgatctcgtccgtgtcctccttctgccgcaccgagcagctgtcgtcgtcgtcgtagccgacgctgtccctgtacgcgcccttggcggcgtcgtgcgctccgccgccgccgtacacgttgttgtcgtacgccgacgacccgccgccgaacttgtgcgccagcgaggggtggaacatgacccggctcttggtgcacgtctggtcgaagatgacgtagttcttggggcacgtggccgacggctggaactccagctcgttcatcggcgccgggaagtcgtgcgtcctcctcccgaccatcgggtcctcgtacgccgccgccgccgccccagccgacgggtagccgccgccgccgccggagtagtacccaccggcgtcgtagccatacccgcctccgtagccgtagccgccgccgtagccgtacccctgcggcggcgagtccctcccgccgtagtacccgtggtctccctgcatcttcttctgctcttaacttccaaactctgtttgtctcctctgtttttttccttgtgagagaagctgcgcagctagctctctcgtcgggtgaagaagggaggaggattatgtactggtcaacctacgtcacgggcttgagaaggtgacggaagtactcggcctgcacgatcacaaatccaaaacaacacatcagaaatataccccagatcatggcatcatcagaataggcaaaatggcaacgcatctcggttcctgtagtggtcaagcaactggtgcgagattaaagcgactttttgtttgcaagtaccaccaactttggcctaccccacacacacattgcatacaacatactgttgtccacacaaggtggggcatgcccggaaagatgtgcacagaactaacggtttcgtgagagtgcaaacaggggacaaggcaacttgcaattcatagtggtgcctactactgctgctgctgctctgctccaatattttaagtgtcccaagccaacccgagctgctattgctgtgaacacaagcagggagagaaggggggaaagcggcctaattttagtagcgttttttgggaaaagaagggcacgccgcgatccggactgagcgcgtgcaagcaaaatgcactagctagctaggcaaagtcgcgcgtgatcgggcgcaatgtttgtttggcatgccgtgcaatctactccaggagtgggcatgcagtggcacaacaccataccaagttaacaacaacatgacacgcaacaagtcttcaagaggttcagcacaacagagaacttaattaattctgtttagcagtatactcagtgtgtccatggaaatgtggctgagtcagttaatatatcacaaatagtaagaggtcataagatatggttggttgacgcgagcttgacagctgcacaagcaatatcaccttgtgcgacacttgacttacggttgttgtcatcagaagactaacaagctaacaggacgtgccactttaacactgacatgccaaacgttttcttctttttgccccccaacgcatatgcatatgcacgcatgcgattaactctctcaattaagataggacttagcgtcaaaaaaaaattaagacaggacttattaaacaccacagaaacagagacgttaacgagagtagaactactctagcagagtagggaaaattgagggggaaaaaaaatcaaggagctgagatagagaggcaatacatgcgatgatcgagcacctggcaaaccttggtcagcgtgtggtagtacgcgatggcgccacttctcatcaccgcgtcggcggcgctcgtctcgctgctactcctcctgctcccttggaaaccaatgcacattctcagtcagtcaccgccggccgatcgacggatcgagtagctttagcttgctctcacctgtaaattgaaacacgatcgatcgttttagctattcattgcactaatggcgcgcgtcaaatgtctaacaagagctgcatgcagccatgggtgatgggaagaaaagagcgctactcacacgatgacgcggaagaagacgaccaaccggacgaggaagcgcacccacggcatggcctgtgtctcgattatcagtggagattgagatggacgggaagagttggctgtgcggggtgagaagccaaagcgagaggagctaaggtttggtttgttgcaacggcgaattggcgaggaggcaggcacagggtttataaaagggtctgggttttttttcactgggagtctttaggccggctcaccgtgccccccaatctattttattccctttcactccttttgagtagatacaggtgaagatacagacagagagagatgatactactcactactcctcactactcatactagtagtagagtgtgtgtgcgtgaggaatgaatcgaagaaggaattaatgaagcgaagagggggatgatatcgagcgtggctgcgtgggcactcgattggagtggtgggtgcgcgtgcctcgtgctccctctccctgctccggaaagcctcggcaacccagctcaccccgactactctcgtagtcggcgtagctcctcctcgtcctgacgcgtcggctccacttcccacgtgtcgcccactcgcctccaccgcggcgcctcgccgtgcatgccagtggtcagtggataaacgtaccggccggcggaggtggaggtgggtggccagcgtgcggcgtgcgctacgccgctagccagcagccgatcgatccgcacgtcgccgcgcgcggtcgccgctgccacctctctcgtcatccacgcggcggtgaccgccgtcgccggggacgaagactacgtgccgccgacgaggagtccacctaattgccagcaaccagcgtgccacgttcccgggctccattaattaccatgccgctgccactagtacgtagtagcactgcaattatcaacaagcagtttcattaacacataaatgatcaatctaattgtctctttgattgcatttgcaaactctgtgcttggagcactgataaattgtactcccttcgtactcgtaaaggaagtcgtttaaaataatgcttaaatcaaactttaggattataaatcataaataacacttaagttgttgagtttgaaaatgtaaaaattatatgaatagatttgtcttgaaaaatatttttataaaagtatacatatatcatttttcaataaatatttttatagaaacaagaagtcaaagttgtgttttggagaccgtgtcgttatgcaaaacgactccctttacgagtacggagagagtactgtgcatcttcagctcgcttcctcttaattagcattgtgcagaattgcaatattgatttgattagttcgcttgatctgggcttctgtattcaaattagtgcagttgttagcttctacatttcagaagatacattgccagaacatttcagattctaactgtgctgtggaaagtattttctaaacctaggtttatgcatgtaatttaaacagttatataaaaaattataaatttaatatgatggactataataatataagacactatataaacatatgagtctaaattcgatagatatatgaagaaaaaaaacaaattttatttgcgctatatgggtagtgaatactgtctgattttgttatttttgtttctctaattgtagaacaaatttagtcatgtatgtttgtaaaatttgataagatggactataataatataagacactatacgaatatgcaagtctaaattcgatagacatatgtagaaacaaaaataacaaattttatctatatgagtactattcactgtctgattttattatttttatttctctagttgtagatcaaatttagtcatacatgtttatgtatagactaatatcaacacaatctatgttactatttttttcaatttattctataactatttaagtcatatacaaataatgggggttgatttagctctttcgtcatgtagatttgatacatgcatgctgaaaattttggagactggtatcttttatttaggaattagaataaacgtatcccatatttattactgaattgagcattttattctctatggtcacttggtcagtgcacacatttcagacttttgtttaacaaatatctttatctgaatttgaagaagagacacctactacaaatttcatttttcatatggcccaaatcgatctttgcatgcgtgtgaatggcccacatgagctcaaaggtctaaaaaatctacatgcgaaaatctgattttcgcatgcgggcatttaagccaaccacatgcaaaaacaaaaaaaatcacaaaatatataaataaaattctcaaaaagaaaacccagctccgccgctgctggttgcacaatcccaaaccctagcacgccggccgcccgcccatcgccactctcgagattcgcccgctcccaacggcggtgcacgttgctcccgcccactgtcattgctgaggtcgccgccgtcgtgacgagatatggtagctgttgttggatctgtgcaaggggagagcgccacctgttgacgatcaaatttggtaaattgtgaaccaggtttgacattgggatcgaggcggattcgataaagagatcgattcgaagaacagagtgtgcatcgactgcgaatgcatcggctggagtctgcatcggctgagatggatcggacagaggacagccgatacagctgatagaggtgacgcagccgattccgatgaagatgttttcaaggttatatatcgacagaagatggggtgttgcttaaatgatattactaaagctgataaaatttttgacttgctacttcgggagaagcaaatacaacttcctgctggccacataatcccatcggctgaggaactagggaaaagaaagtattgtaagtggcacaattctggttcccactccaccaatgactgcaaagtctttagacagcagatccaaacaaccattgagggaggaaagatcaaatttgatgattctaagaagccgatgaaggtagatggacatcctttccccgtcaacatggtgcatacagctgggagagcagccgatggagggaaaacttgaggttctcagttgaattcagccaggattatcaataaatatcggaaaaggcatgataagcaacaggcgaaatactacgagcaagatgatgatggtttcgatcctcattggggttgtgagttcttcagattttgctggaatgaggggatgagactaccatcgattgaagattgccctggatgtagcgatagtgcagggagttcaagccgatcttacaacagaagcaatcggctgagtcaaaaaagaattcatgttcatcaaaggttgggcccggtcaatcaagatcgtcatcaagatgaggacgagggcaggaagacacaatggtgcccttctggtattttcacaaagaatcaaaagagaagggttcagcggatgaggaacagggagcgttttcaggaggtggaacaggaaatcaaccatcggctgaaaaggacaaagcctaggcaagagtggcgtgtcaagagcaaggttgcaacaaccgatgaggttaaagccgacaaggcaaagaggttggccaaaggaaagagtgttgcatctgcatcggtaaatatggtgtttttcttacctgcggagtacgaagccaagcaagccgatgttgatgaagttgaggacgcctctgctacattgattttgtcgccagagcaagctattttttataagccagaggagacagaaaatcggcatctcaagccgttgtatgttaacggttatgtcaatgtgaagccgatgtccaagatgatggtcgatggtggggctgctatgaatttgatgccatatgctacattcgggaagttgggcagaatttcagatgatctcatcaagacaaacatgtttctcaaagactttggtggcaatccatcggagaccaaaggagttttgaatgtggagctgacagtcggcagcaagactatccctacaacattttttttcatcgatgggaagggttcctatagcctgttgcttggaaggaattggattcatactaattgttgtattccttcgaccatgcatcagtgcgtgattcaatggcaaggtgacaagattgagatcgtgctagccgacaggtcagttaatgttgctagtgtcaatttagctctttgggagatggatgggattgattgcctgtctggaaaagtttgggatggagattttctaaaagtgtccgattgtgatatacagccaattgaagatggagaccccaaattattattttaagggcgtcgtgcagggttcaaatttctacaccaaggacacggtggatgatctcgatggcaaactgggacagggtttcatgtcggctgatggtttagaagatattgacataggcccaggagataggccaaggccgacatttatcaacaagaatttattggcagagttcagaaccaagttgatagagcttttgaaagagtatagagattgctttgctttggagtattacgagatgctaggactcagccgatcgattgttgaacatcggcttcctatcaaaccagggtacaaaccttatcaacaacctccaaggagatgcaacgccgatatgtatgatgctatcaaggccgaagtaactcgattgtatgatgttggctttatcaggcagtgccgatacactgagtgggtttcaaacatagtcccggtcatcaagaagaacggcaagcttagggcgttcatagattttcgagatttaaacaaggctacccctaaggacgagtacccaatgtcgattgctgatcaattggttgatgctactttggggcacaagattatcagttttatggatggcaatgcaggttataatcaattttttatggcagaagaagacattcacaagactgctttcagatgtcctggtgcaaccggtttgtttgagtgggttgtgatgactttcggcttgaagagcgctggggcaacatatcaaagggccatgaattatatattccatgatctgatcggtttgttggttgaagtctacattgacggtgtggttgttaaatcaaaaaaggtggaggactacatagccgatttgaagaaggtttttgagaggacgaggaagtatggcctgaagatgaatcccactaagtgtgctttcggcgtatcggctgggcagtttttgggctttcttgttcatgagaggggaattgaggtaactcagaagagtgttaatgcaatcaagaaaattctacctccagaagaaaagaaacagttgcaaaagttgatcggcaaggtaaattttattaggaggtttatttctaacttatctgggagattggaaccttttacaccattgctaaggttgaaggctgatcaagaattcacttaggggcagagcagcagaaggctttggataatattaaggaatattttagctctcctctagtattgattcctccacagaagggaataccattcaagttgtacttatcggttggtgagaagtcgatcggctcagttttgatccaagaacttgaaggcaaggaaagggttattttctatttgagtcgcaggcttttggatgcagaaacaaggtattctcctgtggaaaagttatgtttgtgtttgtatttctcttgcaccaagttgaggcactatttgttatccaatgaatgtactgtggtatgcaaagccgatgtggttaaatatatgctatcggctccggttctcaaaggaagagttggaaagtagatatttgccttaacagaatttgatcttagatatgaattacccaaggcaatcaaagggcaggctatagccgattttattgtggaacatcatgatgattcaatcggctcagttgatattgtgccttggactttatttttcgacggatcggtctgcactcatggatgtggtatcagcttggtaataattttccctcggggggcaagttttgagtttgcctatactatcaaaccttatgcaattaacaatcaagctgaatatgaagcggttctcaaaggtttgcagttgctcaagaaggttgaagccaatgctgttgaaattatgggtaattcgttgttggtgatcagtcagttggcaggagaatatgaatgcaaaaatgatacattgatgttctacaatgagaagtgccgagaattgatgaatagttttcggctggtaactctaaagcatgtatctcgggagcaaaatgttgaagctaatgatttggctcaaggggcatcaggatacaagtcgatgataaaggacgttgaggtggagatagctatgatcacagccgatgattggagatatgatgtttttaaatatctgcagaatccatctcaatcggcttcacaaaagttgcgttacaaagctttgaagtacaccttattggatgatgagttgtattatcgcacaaaagatggggtgttgcttaaatgtttgagtgccgatcaagctaaagttgtaatgggcgaagttcatgaaggtatttgtggtactcatcaatcggctcacaagatgaagtggttgcttcgacacgcagggtatttttggccgacaatgttagaggattgcttcagatattataagggatgtcaagattgtcagaagtttggagcaattcagagggcaccagcatcggctatgaatcctattattaagccatggcgattcagaggatggggtatggatatgatcggtcagattaatcctccttcaagtaaggggcataaattcatattagttgcgaccgattatttcaccaaatgggtagaggctattcctttgaagaaagttgattcgggggatgctatacaatttgttaaggagcatactatctaccgatttgggattcctcagactataacaacagatcaggggtcaatctttgtgtccgatgagtttgttcagtttgccgatagcttggatatcaagttattgaattcttcgccatattatgcacaagccagtgggcaagccgaggcatctaacaagagtttgattaaattgatcaaaaggttatatcgacagaaagattatatatcattaatatctacagccgatcgagtagatttagtcttatcttgcttatttataactgccgatcgattcacatatgacatcagctcaaaaataaatgatatgtcatcggcgactggccgatcggctatcgtttatggatttaaccgcggtttcttttgtctttccttcttgttgattgcaggatcaaatcaactggcacgctcacgaacctaaaagcaagattttggacctgcactgaagttaggcagatcttccaggctagtgtatgtttttcgcatcaacaccaccgccactggatccgggcggggaaggggagggcctccgcctgtcgtcgtcgttgtcgcaggaaagggctcccgttgttcctgtccgccgcatgaccgaggtggtcgtcgtcgcgggggagggcgctgctgccggatctgcgtggggggagggcggctatccccggaccagtgcgggggatgggacgccgtcaccgggcgcctcctccgccagcctccatgcgggggacgaccgccgctaaccgcctgccactgattcccgtagccactgtcacccaccgtcacgcctcgttacccacccgccagctgaaaaggagaagagacgagaggacgcgaagaggagaaggagagagagagagaggaagataagattgagttgaaaatttttgaactgttgagaggaaaataggaggcaggtcagacttctaggcggctccttaatagatccgtctacgaaaatcgatttttgtatgcggatctcttaagaggccgcatgcaaaaataagctcatttttgctagcggctccttaaaaggtccgctgcaaaaatcgacctttgcatgtgggtctcttaaggagccgtatgcaaaactggagatcgatttttgtagacgcagttatgatccgtctataacctaatgaggatctcatccagaaaaatcgttttttctaatgacatttcaaacttcttcatgagctttacttattattaatattattcagctatctgtctctgaacaaatttgctccacactcacattgcatttcttgggttttatccttatgaactgaaaatctgcatacttgatatgctaactatttctaatggcataaatatgctcaagaaggcgggtgccaagaccgacacggcctacagccttggcgtcaccatccacaagctcctcaccggcaagcatcccgccgaaagcgaaatgacaatggtatggatcgacctgcagcagtgggttacgtccaatgtcaaggaggagtggaccaacggtgttcgccctagccatcgctggtgagcgcgcggacaacgggcaaaagagctgatcgacgagatagacgacgtcggcggatttgcaaagtaaatatgccgatgcaatctgaggctctgagcccgtgagccgacaggcttgggagatgacgggtgactcggctcctccattctatttgccctgcgcctggagccttgcccagctgagacgttcgatcgctcggttgtccacgtgacagctatatagggtggggatgaatgagagcctgttaatttgcatcctgtctccaccaaattttttttttcattcttagggcatgtttagttgacaaaaaatttaccgatggagaaaggggctttactctcggtttgtaaccccccttagtcccggtttgaaaaccgggactaccaatccgggactgatctttagtcccgggtgaaaaaaccgggagtaaaaatcaatttttaagtcccgatagagcctttttagtcccggttggtagggactaaagatagagctaggctagctagatccggttgctccattattattttcttttcttcattgtttttaatatattgatttcaccccatccccatcccaaaatcccaaataaattatccccaaatcctcaaatcctcaactcctcaaatcgatacatcatagatacatcacaaattttataaaattcatcacagatacatcacattcacatcacacacaaattctaaaaagaagaaaaaaaagcccgttgtcgttgccgctgccgctgcagcgccggccgctggcgcgccgcccgccgcgaggccgcccggccctccgccgcgccgcccagccaccgcgccgcccgcaaggccgccaaggcctccggcacgccgccggccaccaggccctccgcccgccggcactcgtagaggagaaagaggaaaaggaggagaggagttagaggagagaagttaaaaggagaggaggagaaagaggaagagatatggaggaggaagagataagaccagggagaagatagaatatattaactgctcctcctcgtactctccaccgcccatgttgcgcatgccaatcttttattccggttggtgttaccaatcgggactataaatagatctttagtcccggttgatgatcttttgttccggttggtgttaccaaccaggactaaagataaaaaaaaaaactctaaccttttgaaccgggactaaagatatctttagtcccggtttttattgcaaccgggactattgtgtattttggccgaccgaccaaagatggtgtctccatcagtgatttatccctgtatgtcacattggatatacggacatacatttaaagtattaaacgtagtctaatagtaaaacaattacagatgccaccagctgtaaactacgagacgaatttattaagcctaattaatcctcattagcaaatatttattgtagcatcacattgtcaaatcatgacgcaattaggtttaaaagattcgtcttacaatttcctggtgaactgtaattgattttttttcaacatttaatacttcaagcatgcatccaaatatttgatatgacagagcgaaaaattttatttaggaactaataggcccttagatgctgagacgagagaggcagcccgcgaataggacaagtggggaatccgatcctttgacgacggcacggccgggccaatcgagtcggccagcgaaatgctcggctccgctctccagcgtgcgtgtttcgatcgatccgagccgcacccacccaccacttgcctgcatgcatgtgttgttgctgcagcagcagctgcagagctctcgatagatggacggatcatgagcttgcctagctgttctttctaaggaaaggtgatcatgagcttggctatgccaaagtgctccaggcattgtttgtaccctagcagctatgcctacagcaggaatagctaccgtacgcacagctctgtattattgttcgtatcgtgcacgggcacaccgtaacattggctcctccgagtaagcgaatatctgtatatctgatgtcctattagggcaaaagcaatgcgtcacggtatttgttcagcctggggtgccacgttggatgtaatttgtaccaagcaacttaacccacagtgcaagctaattgaaatgagccccaccaacatcactttttcatctttcacctctctctctctctctcctctttaccttttccaaaaattccaatccatcccctcccaaccgattcctctctagtctccgggcgatccgtcggcgccggcgccggcgcctgcctccctcccctacccgcctcggcgcttgacggcggacggcatcccgtgggatcggcgctcaacggcggcggcggacttggccatatctcctatcacgtgcccccgccgcctcgtccgcgtcttcctcgccgccgacagctctctctctctctctctctctctctctctctctctctctctctctctctctctctccccacttgggccgggtgtgaggggtggcgggtggcggtccgagcggcgacggagcggtcgggcagcgcgagcagcgacgtcgctagcggcggatcgagggcggcgcgaggcacgagcgccaggatggcttgagcggcgagggcggcgggacggtgagatccaacccccctctcctcttccgaagcagcggcggcgatggcggcggggcggccagatgccttcccgttcgccttctcctcgtcgcttctcgtccggtcctctctctccccgtatctcaccgcctttggtggagctcggcgcggcggaagacggcggcggcgttgagcggccttcgagtggcacgtcagaagacggaaacggcgtcgagcagtgcggtggatctcacggccgcggtactgcggacgacggcggtggcgtcggcgcccctactcatctccctctccggtgagcttcttcggcgcggaagtggcttctccggcgagcttcttccctctctctctctctcctgctctgtgtgtggcatgttttttctctgacaaatttcgctgaggttcggagccaaaacaagccacgcgaacctggttttcacgtgggtcccacctccttttctcctccacgcaggcattgtgcttaggtggatagactttgccacacgccatgtgtgtacattgtgaacgcccttagagtttaatactccctccgtcttagtggatgcaacacatctgtctagattcattatattaaaatgtgtcacatccacccaaaatcccttatattatgagacagagatagtactattactctctctatagtaaaatatagctatttttggctaccaaattcataacaataataactacatgcctgttcaacatctaggctatggctacacgctgctgattttatgagtgaagtacgttacccgccagtcaaacaagcccttcattttgaaatggagggagtagcaaacgatgcagaatatcgaaatagcttaccttcggtccaggtacaaaatcgtttgatcttagttactccctcaatcccaatataaatgtaatctagtatatatgtgatatttctaggactagttttaggatatgtcacaaatacaccaagttgcacttagggggtgtttagatgtaggggtgtaaagttttggcatgttacatcggatgcaggggtataaagttttggcgtgtcacatcggatattatattgggtgtttggacactaataaaaaaactaattacagaatccgtcagtaaaccgcaaggcgaatttattaagcctaattaatccatcattagcacatgtttactgtagcaccaaattattaattcatggagcaattaggcttaaaagatttgtctcgcaagttagtcgcaatctgtacaattagttattttttagcctatatttaatactccatgcaagtgtttaaacattcgatgtgacagggtgaaaaattttgtagtgggatctaaacggggccttatattaggaccaaaaaaagtacaacattaatgggggtgtttagatccaagggtgtagagttttagtgtgtcacatcgggtattatatagggtgtcgcatggtgtgttcggccactaataaaaaaactaattacataattcgtcagtaaaccgcgagacgaatttattaagcctaattaatcaatcattagcaaatgtttactgtagcaccacattgtcaaatcatgtagcaattaggattaaaagattcgtctcgcaaattagtcgcaatctgtgcaattaattgtttttaacctatatttaaacttcatgcagatgttgaaacgttcgatgtgatagggtgaaaaattttggtgtaggatctagactggccattgtatgagtaaaaattaaacgaatattccagttgtcctctgccatggatggatgatctggtctggtgcaatcaaacgtgcacgccaggatatgatgcgtcctggcagaagagccaaatccaggcaccgctgctacgagcgacaggtcagactctctctgaaaaggctgagcccgcatcgcatcgtgctatcgtggccgtcggatcgtcctcgtgggcagcggtggcgcaggcccgggcgtgtcggattctggtggacagccgtcggatccagcgcgcgcgtgccaaagcgcacaatccactgccccagcagggtgggccccacgcgacctccgaaccggcccgaccttgtcggaacagaagccgccccctagagccaaccctaccctacgggacgctgaccggtgggaccaaggacgctgacagccaaatgagggctgcggcgtcacggccactgggggcagcatcatgcccgccgcgctgctgcaccctacttactagccataggagtagcctactacagtcctacgatatggtaccctcacttgtttgtcaaactgggaggtgtacttgacgttggccctgtggctttgtccacattgttcttgagcgacctgatcatgtccatgattgttcattagcccggggcagtcattgaccatgcattatgcagtatagcatcagtgatcaactgacagcaaaccgtagtttagtactagtactacaacctctactactcactcccaaaataaattgatttttcacttacaccacgtatcaatggaaaaaaaaacaaactaaaatacctataccacacacgtttgagatttgacagcaaaccgtagtttagtactgcctcatttctaaataaattcatttttcactcgtaccatacatatcaataaaaaaaaatagaatacccataccacacacattagatctgttcgatgctgctagttgacaaccaggagctacagtgaaaatacaatgaagaaatatagtggcagctgcagcggccacggctatacagccgcgccataggacagctgaacatgcccatttgagatttgatagtattttctatttttttccagtgttgtattaatatctgtgaaatgaataaaagtaaatttattttggggcggcgggagtagaactttgtttctccaccaattggcaaatatttttgttatggccaaccgaacttgagtacacccacaattaagaaaagacagcggaaacaccatgcgcccacatgggcaggcaggtgggccaaaacacatgcccgcatgcattcatccacaattatacgctagtgcggcctcacatttgtagttgcacgccctcgatcccctgcaccttttgtaaaatggagtactattcgtagtagcagcagcagattccatggaaagatcagcggcaacactagacaggacagtcaccttatgcaaacaagattaattagcacccgcatgcaattaagcactaacacgttgcgtatgaatgcatgcatacttatatactcatagaccatagtccatactccatactgcatacacatggatggagcacgaaaactaacttctattagttgcgtgcctatatatatgtcaccgaccgagagtcacgtgcgatgaattaaatttgaaatattaatatattgttcatttttctttttctcataaatatcctgaatgtaatttgtttagcacaatatactgtcgatatcgctaaattcttgcacacaagtgacgtggtgagaccgagcgctctcatgtgatgacagttctgaaattgaatgattagcgactatttggtctcgctcattgggcatgcgagaccgcgccacacgacaccgagtatagtctcgcccattcgtcgcgcggcactgcaatattgatggtatatctgtatcaataaaattgcatcccgcatatttacgagaaagaaaaaatgaacagtatattttaaaatttaattgcatgtgtgattgtgtgctaagaagtggggcccacaatgcagagggggctagtgaaactttttgttcgtgtagcggtgcaatatgcaggattgcaaatgctactactccagtttgcagatgaatcagtatggagagataatgaagtagtactaggaggagtaatggagggcatgatgatgattgtggcggtaatatgtatgggttgcggcgtccaccgtagaccaggtccaaggtgcagagtggctcccgaggcgtgcaggtgtcgggagcggcgtcctctcgatcgccgatggacgccatcatcatcgcagccatcatgccgtcctcgcgccgaggcaaccccaagacccaaaccaaacgcagtatagtggcggtcggccggcagcagccacagcagcagcggcaacggcgaggcccagccgaccctgattggcggccccccgcgcccatgccgttcgatcgatataccagcttcttcttgcactagtgtgtagcccaggcccagcgcgcagccgcgcgcgtgcgcattagtatactggcgatgcggctactgttggtaccagctgccactaacgcacgcacgcacgcaggcgagacggggcgcgcagtgcacggcacgcacgcacgctagtatgatgcgcgcgcgcaccgcaccgcaccgcacaagcacatgcatgcatgcatggtctggtcgtgtcgtgtcgtgggggatgcatggcacggcatgggagggagggagatcagtgaccgagccgatacggctcctctcctcgtcggtcgtcgcaggtgggggtgcgtgcgcgtgtgcacgaggcgaggcgagggcgaacggggggtgcggggcagcgagcgggctgcgtaatcgagtgcgcccgcgcggggaggggggatggggggtgggtgatgatggcgcccgatccggcacggttccgggtgccgcccgccagatcttctttgggcgccacgagcctcacaatgcgcccaattatgaccgcgcacgccgcgttcttcccttccccccgtcgtcacccatgcaccgtgcacacacacactgaacagagccggagcagctatagctagccggcctattgcgattcgtctcgttgccttttggcatcggggctagtacctgcaagatccttgctctctctcaatttactctatagcatatgctgccactacggccgctagctgccggatagcatggcgattggcgagtagtactactattaccgggcagtatacgtttaaaaatttgaaaaggagggttcaaaagagagggaggagagattaaaaaaagaactggtgtagtagtagcgtggtactcgggtacacgttggggttccccaagatcataatgggagtttggaatccatgcacggatgatgccccatcatgggctctgctgaccggccggaacccggaaggcaggccatgggatgatgctatgctactacgaccggctggctcttccttcctcctccgtctccgtctttttgtgctcctgcgacggatgcttttcctcggttattctcctctttctgctttcctttccggcccctagagaagaaagagagttgggacggacgaaacaaaagcgaatcagttcgccgtggatcttggattgttctctcgatctgctgaccgtgggcgggcgggctgatgatgggtcggggttcgggcctgcccgtggtagggggcatgatggggtggcgtccaacgagcctgagcctgagctggcttgtgagagctttgaacggggacggggttgatcgaggcccgtgccgaatgattaggcgtgtctcatctacgacgaccctctgtacgtacgttcgaccttccaaagtcactctgcctgcctgcctgccgccaaaagattttgccgccgtgtcctccctcgatctttgctaggcatgtaccccatattgagggatttatagcaaatacattactgcttatttggaacataaaatttagaaatgcaagaatatgaaaaatatagaaatgaaatgtcgtgtgtaagcaaattccgcaggaatgcaaaacacagaaatttacaagactgtgtgttcggatagctcacaggaaaaaaggaatttggatggattttagaaagaaaagagagacaaagagataagaagtagtattgaacttcaccctaaaaaaggaggaggaagtattggacttcttaaacaaaaagttaaaatgaggttgcagcttacgtgtaaaattttctatggaatttggctataggattgtaatccaaaggaattttcctacgttgcaaacaaccaaaatttccttaggatttgaatcctttaaattcctaaggatactctattccaatgaagcgcttaaatttgagttgaaaatgagaggatcgttttggagtaagatataaataaaattaaatgtgatggatgacacaagcgcaaaccactagtacaataacgatttttccggcagccggaattgatttttgcatgcggaacttccactcgtcgggaacgaggtgtcaacgaaaatccgaaaatcgcaatttttgcgtgtgggttcttaagccgcccgcatgggagaataaaaaatcaaaacaaaaaaataaaaaaaattgaaccctaatctagcggccaccaccgctgtcgcagccgtcaccaccattgtcgtcgccgacgccttgcccaggcccaccgccgtcatccccgcggtcgccagcgacgaatctggcctccccgcggtggcctgcgacggatccggccttcccgcggtggcaggcgacggatccggcctccccgcggtggctggcgacggatccgctccgcagccaccaccctagcgcgccaatgccaccgcctccgccgctctaaccgatgccgccgccttcgtcgctctaaccgatgccacagccctagctgaggccgccgtcgttgtcgagattgggagatgggaggagggggaggaggagagagaggagtcaagggaggaggaaggagatgggagtcaagggaggagtcgaggtgggaggagatggaggagagagaggagtcgagggaggaggagggaggtgggaagagatgagagtgtgcgatgggcggagatggcggcattaaaaatatgggtaggtattttcgtgtgcgggtctcttaacaagtccggacctgttaaagtggcccgcatgcgaaaattgatttttcagtgtggtcattttaaagagccgcacgtgaaaatagagctcgatttttatagacgcgaccacttatggttcgtttgcaatctaaaatgagtcccatccaggaacatcattcctgtactaatgaacactataaaactacttatattttgatacaaatttcaaatgttagaagtgatctattatattattaaaacagctttgaaagaaggcaccatgttcgctgtgggtgctagaaatttccacattaatcagaaaaaaagaaaaggagagtccaagtagaaatacaattcaaaaatagctgaaattcgaaattaaaaataaggaatattgagagaatagtcaatataagaacccaatacgatattagttaatattcggaagaaaaataaaaataaaatctaaaattagcaaaaagaaaataagagttcaagtaggaatacaatttaaaattaacagaaattcgaaattaaaaataagcaatattgaaagaataatccatataagaactcgatacgagattaattaaaattcaaaataaaaaataaaataatataaaaaattaaaaaaagtaaaagagagttgagtaggaatacaattttgaaacaactggaattgaaaaataaaaatattaaaagaacactatacggtattagttaaaatttgaaaaaaaaaattctgaaattagaaaaagaaaaaaaagatttccattaggaatacaatttattgataactaattggtgatagaaaataaggaatattgaaagaaaagaccacctaaaacacatgataagataaattaagtagcatgcctataaaggagtagagtggtggcggttgatacgatatataattgttaataaaacaccaaatagaatcctaatgacgattaaaaggagggacaacaggtaggtcgtgaagcaaacggacaagacggttgccaggacttctagaaagtaaaaaaataaaccacattgataaatcatattcgatttttaaaatctcaatgacaataaaaaggagaagcagtgagctgggtgtataggagtatagttgcagagccaccgatggttggcgggacttctagaaaataaaaaataaattccaacgataggtatgttcgatttttaatcagagaaattcccacattaatcagagaaaaagaaaaggagattccaagtagaaatacaaaatcaaaaatagctgaaattcggaattaaaaataatgaatattgagagaatagtcaatataaaaacccaatacgatattagttaatatttggaagaaaaataaaaataaaatctaaaattagcaaaaagaaaataagagttaaagtaggaatacaatttaaaattaatagaaattctaaattaaaaataagcaatattgaaagaagaatccatataagaacccgatacgagattaattaaaattcagaataaaaaataaaataatataaaaattaaaaaaagtaaaagagagttgagtaggaatacaattttgaaacaactggaattgaaaaataaaaatattaaaagaacactatacaatattagttaaaatttgaaaaaaaaataaattctgaaattagaaaaggaataaaaagatttccattaggaatacaatttattgataactaattggtgatagaaaataaggactattgaaagaaataccacctaaaacatatgacaagataaattaagtaacatgcctataaaggagtagagtggtggtcgttgatacgacatataactgttgataaaacaccaaatagaatcctactgacgattaaaaggagggacaacatataggtcgtgaagcaaacggacaaggcggttgctaggacttctagaaagtaaaaaaaataaaccacattgataatcatattcgatttttaaaatctcaatgacaataaaaaggagaagcagcggactaggtgtataggagtatagttgcagagccaccgatggttggtaggacttctagaaaataaaaaatgaattccaacggtagttatgttcgattttgagaatcccaatgataataaagagtaggcggcgggtgagctgtagaggagtatagtggcatcgtttaacaggacttctaaaaattataaaaaatgaaacccaacaagacaataaactctaaaaactacaaggtccaatttttaaaggttcggaacttctaaaaagtaaaaaaaaacccaatgacaatcatgttcgattttaaaatctcaatgacaataaagaagagaggcagcagataagccatagaggagtttagtggcaaagccgttaacggtttggcgggacttctaaaaagtaaaaaaaaatgaacccgaatgattattatattcgaattttaaaatcccaatgataataaacagaaaaaagacattggacgaaccgtagaatagtataatggcagcgtttgatgtgacttctagaaattataaaaagaaacctaacaagacaatagactctaaaaactataagatccaatttttaaaggttacaaggagaatgaatagaaagtggtagatctagcaagcaaataaagaaggagatggcagaagtaaggggtagaaattgcagtgacttttaaaaactatataattagaaacatggggatgataaggtttggtcattcaaagtcttaagacaacgagataggtatttaataaatttttaagtaaaatcatacttaaaaaaatatatgattttgtttgagctctagccgcgcaattgcgcgggccacccagctagttatatattatgtaatggaggaagcacgtacgttcacaaggatagcagagttattgtgctctttgtaagggaatataaagtacatataatatcaaaccttatcatcatgtccagattcaaacccagggtttgtctttttttgggacggagggagtatacgatattattcaaatatttctcaaatatactccctccagtatatgcatgataaatatattacgtttaggaccagattaattgatcattttctttcttactctgatcatccattataccccctccgtcccaaaaagaatccaaccctagctatgaaactggacatatcgttgcaaggatttgcttttttttagacggagtaatatattagaataaatctataaaatctaacaagtttatgatgttatgagagtatttttttaagcaaatctacatatattccctttgtattttaatatatgccacaattgagttgattcgatcaaaaattcaagattggaccatcaatagctcacacgcgaatgtgcttttaaacgagtttagtgagactagaaatttattgtagttttcatctctttgagcgctagtgtcatatttataaatgtgcttcagtgtggtatgcatctgtacaagtatctgtatacatcatttgtgtaattaaaaaaaatagttcaaatacataaaatgtcatggtcagatttttcattatgacttctacttttacaatattataattttgttagatatattattagaaaattagtgatcaaacttgcacaacagatattaaataaatcaacaatattatattttacaatatagaagcggtactatttttcttccttttaaactaagcattctgaaaataaaatactgttggccgaagttttaaaacttttgaagtctgtggatgagatgagatgatgatccctgtcaactggggcctggccgcctgggcataagtggctgaaccgctgaagtggtggaaatctggaaatggatttgggctggcctgcccagggatgctggcgtgtgggccaaaattgggcaggaggtgaccaaaattggcctcatcgaaatctttcttgaccatgtgccttgcaaattttctataggtgcctcactcaagcaaattggcctaaatttgtaggatcgttggacctctacctgaaaattcctagacttcaacttttactcttcagtgttctttggtgtgtttcttattataaatgcatacacacacattctaaaagctactaaaacaaacactaggtactgcaaaaaaaactgaagcgttacaaaatatcatacgaaacttatcagacaatcaggcaagctgcacaatcagaatgatgcagcgggtgctagacgatgattcagtaaagaagtgataacggcataaagcttcccagatagatatgcctcttttgcaatgtaccgtcctttttattagataatgtgcaatgtcccatcctgtacatatacacacaagctaccaatgcaaagcactcacgagcgcaacaatcttcgcctatttgctgacatcattggatggtgttctcatttacatctaaatttgcaatcaaatgtctgatcaactaccttaatctgtacagtgaatggtgatcatcaagaaacctacagctcaaccgtacagagagctgcagtcctgaaatcaattggtacgttaacagggggatgtgtggtgagcaccctccacatctttgctgcagggttgtaaacttgaaactccagcgccaacctcttcttcgactgcttccatggacttgaggtttcgacagggagttttgcagatgtaagaacataaagttcgccattcattgctatgaaaccacatgattgagtacttgggatctttctcctcaatgtagcttcctttgaccaactgttcgaagagaagttatacctgcaccaagacatgactattagagtctggttatatgcgcaaaatttttagtaaccaagccagaagaaaatggttatagattccagataacatagcaatcatagtataagtatcaagtatgatttgtgatcagaattgcaaaagagctaccatgcgctctacgaaacagtaaagttcataattacaagtttctcatcaatagctaccagtttgttcaaaaatcagaacataatggatatacatatttcagttataacttgagcttttccgtggtccttgaggagagtacctcaactgttagaaaacatccagcacttaacaactagcaaacaaagtgttaggtgcaacgcagcttgtagttaattatacaagtcagcatgaagatcagttccatggactcctaacagaatctctcatgcaaacataaaagacagtttaatctcaacataggtataatagagttgataacacatgcagtacaagcttcgatgaggctttgactagctgtactcgtgatggaaacttgcatacagaataactaagcatgtattcagaaagcagtcactatttgatatttatgaatttatctaaattctcttcctcttttcctcaaggatacatatcaatgccactccccattggcaatgtcacagcatacagttctctgagatatatttactttgacataaactaatgcaaagaaatacaccccaatggcctggtggtgaagctatttaataactccatccacttgggtggctgggtccaaatcctaggattgcttgggtgcacatcaccgctcctagtgaatgtcggaaatactagtcaattttcaataaaaattaatgcaaagaaattcgcactgatacctcttgcagtacacagatacatctctatgtagttcatttagctcattgtggcaacaaaaaactgttggtttttcacttaactttggcaacaaaaaaaacatgtattaaaaaatatagtaagaagttaagaacagatagttttcataatatctaaacatatctaccaagttcccccgatcgttctagctaattatggtggctacaaaatgacagcattcaggtatgatttagaaagcacaacacaggagtgatatttgtttccaactaatgctatgaaattgctcaattgcatctgatgtaaattttaataccaaaactaggaagtggtgactagtctcaaaatggaacttgtaacacgctaactgctagcttaatcctatgtacctatgtggaaagggtttgctacagtattccctccgaatgtaagtttgttaatcataaagcaaagtttgttattaatgaccagatggatcttctctaattggggccttgatgtccagcagaagatactatgtcagtctttacaaatgttttacccactagttaagtggtactgtgaacactacgcaagctaactgaaatttttggcagttgatacaatgactttttttggtttctaatgatataagtaggcacacctatttatttaaagaacatgttaagtgaagcctgattagtgtacaacgtcatttcattcagcaaatttcacaaactaacaagtggtaactgtaatcatgtgaactggtgtgatgtttatctagcatgtcaaaattaaatgccctcagttaaacacgcaattgcctgtccatatttaaccaatgacatcactagtacatggccacttgcacccttatgttgataataatttaatgctaacactttctcgatattatgtatccattacattccaaaatatatccataataacaagtctatgattgcatggaacaagtgaatcttgtacatggttgcaggcatacaaatgtttaccaaaatttcatctccaatcatgatattgaccatgcatatgaaaacccttttcttaacatgaaagcaacaagcagctactgagataaggtccacaaaaccaaccattgactaacaaaccaatcaaaacgtactttacatttaaaacctctgaaataagacagcttcaacttcatcatttgtatttacaacctctggacttcaaaagttgagtgttttatctctgcctcttgaaaacaaatgttattttttctgaaattttgtacacacaaacatctttattgacaaccataggatgaagacaaatagaccacatagcaagacctatatttggttcgttctcagtacatcacgtcagcgcatcactcatgcttgcttaaaatcaagtgaccaaagggtggggacattatcttttagttagtgctgtgagtttttattttggttgaagagatgggtgaggaaaataaaaatgttaagcaatgcttttccatgagatctgctccgtaatgtaacacaagaaagtaatatgcatgaatggcaaggaaacgtctctgtaaacgaaactggaagagaagcaaaagatatctaggctcttcaatcttaaaattaatttccagattctaaaaacatggtatctgcattattagtctatcaaatgtatggcagcaatgacatcaaattcgtcagagactcagctgagtactgcatcttaatagttggcacctaaacaataaaatggaacaaacaaaaagtgttgtttcccattattctcattccatccatttgtacatcttaacaaaatcaactaattacagaaccaagacaccaagcagaaaagaaagattaacaaataaacacccttgcccgactccaaactcatcatatagtgaataattgagctaaattaaattatgaaattgaagcaacaaaagtactaaacatgttatgcaactacaagtagaaaagggaactgtattaattaccaatcgttccaagcaagcaaacacacatgaataaagaattacacgaaattgaaattgaactactcgcagacacaaacatatatgcaaaaacaattgtgcagacaaaagaacaaaatccctgacctgaagatatcatgaccatcgagcatgaacacctctgtgacccttccatcttcagcagaaatgacagccaccggcccaaggcgctctctctcccattcctcccacatgtccccaatctccctccacttgccgctccacagcccgagcgccaccgcgtcccggcagtatacgtcactaggcaccactccccccaccgtggtgtagccgtcgtacccgcccatcacccagaactcatcctccctcccatcccccgccccgtgcgcgacgaaccccacgcacccggcccggtccctgggcatcgccgcggtgacgcgccacgcgcgcgctgcggcgtcgtacaactcgacgccgctggtgcggctgccgtaggaggggaacgtcgggtgcctggagccacctccggccacgatgactccgccgctgggcgcgggggcgcaggcgaagctccctcgcgggacgcgcatgtcggggaggcgctcccagcggtggcgggagagggcgaggtcgagccggtaggcggcggcggagggggaggggttgtcgaggggatagctccgggcgtcgaagcgggagccgccgaggacgtagatttggccgccgaccgcgaccgcggcgaagttggcgaggccgtagtgctgcggcgagcacgggatcggcgggagggaccaccaggcggtgggcgcggcggggtcgagcaggatcggggaggcgagggaggggtcggtggggaagaggcacaggaggtggcgccgcggaagccgcaggctgcggcggagcgggaggagcgtggccgccgagaggaggagccgccacgcgcgggaggtggcccggagtcgggactggtcggggaacgtgagcaggcagaggatgacggcggccacgtcgtccggcagcccagggataatcgacgccacgccaggcctcaggcttaggtttccggcgaggcggcggccggcggacgacgacgacgacgacgacgccgccatccgatcgcctcgcgccgcgagcgaaaaggaaaggggaaggaagaaattggcctcgagtcgcgatgctctcgcctctctgcctgcgtgtgccgtgccgctatgcgtgtccttatcgcgcgaggagatcgcgctcgtcgacgaagccgtctccgctaatttccaccacgctcgctgccatgcgggcccccacaccgcaacagctatttctgccccgcctgtcagtgactgaaacattttctcttggtgctcgcatcaccctgtccgcaccttaattttttcagcgagtggatattgtccaaagagcccgcagtgcaactgacatgtggggcctgttgcttacgcgaaccggtgggtccggaaacgtagtcttgtggctatggcccccattgcagatcttctgcggctgatgcctgcagttactagtagtagtactagttttgaacataccgagtgagtgcgagcgcgggcttgtgtctggtcgtagagaatacggagccgatgtgtggcggtgcccggcgactgggtgccggctgccgggagttaccgacaatgacgtaggcgacggggacgggtctgaaattcagaatggattttttggtcggagacgtgtagggcaaaagcaaaggggaaggctagtccgcgaccgtgcccaagattttcatctcgtgaacgtaaatcgggtttggtttaggggtaggtttagtgttaaagatagggatagagctttggagcggaggatcgggcttagacggcctagtaggtgactgatcagcgatgggtggtgtaggcgataccgcagcagctggagcccagggtcagcagcgggtggtgggccggtgttagttgcgagggcaaagcaatgttaatgtgtcggcctcccggttttgtacaccgaaaacttcatgtgattacaataccattctctgaatcagtagatggtatacacatggcaatgttgtatatcacaaagctgacatcgttatacaggctttacaatacattaataatacaatggttgcccgagtggcatccaaatagaccaagtatggtcatctacaaggccaaatatccaaagaagtagatacggtagcggaagcgaagcaacgacggtccatcttattccacaggcagcgactggtgaacctaggtccctactccaccgtcttcaacacctcttcatcagcatggcacacgtataagtcggctccgacttctccttctaaaatatttaattaagcaagggtgagtaccaaccgttctcagctagccaccactacagaatgtatatagtgctcacagggattcaaggatggcttggttcgttaatctgcgagggttcatccaccttccccaagcctcgcttggtccggtttaccctcacaactagttttcccacattttccatcactacgaccttctcactcattggacaaggtcacacctcttttcctaatctaagcaagattaaaatctatgagcctagtcaagagtagtaaaagtcccgacgctcattaaccgcaagcacggctatttgaatagatttgttttactcacactgcagttaatgtatgcttttaatcctgcactccacgacttgcccaacacataagcctagtcccaacacatgagacttatcacgtcccgttttttcagtcatcctcgcattgcagcacccgctccaacgactatagatccccattgcactcccgtcacaacacaacacctcgagctagcagtgaagggagtcctggcgctcccgagataataaaagggggtatacaatatatataacaatatatacttaggtgcattttaggtttttgcctcggcattcaaacgatcgatccaatcgatccacacttccatcacaatcgtcaccactgcagaaccaccacgactggggtgccaccccacaactatttcttagttcgctgggtctatacccattgaagaaatgcggttgtactcgtttcgtttcctgtatagcttcttgactcagtccttaattgaccagggttggcgacttgccgtttacagaaccacccatattctattcatgctgcccagtcgaaatcattttgttttattaagtttttggttttcgcaaaggttttgtgttacgggtggcgctcatgtctccacccgtcttccgacatacactcacatcgagtgatcacctccatcacatcgatataattgttaggaaaccgccggcccatgaaggcccggcccggttaccccctaattgggcccatcactaatatgtaaagtgggcaaggcattgccctataaatagagggttggaggagaggttttgtacacttgagaatgcaatgggtgaatgagaaatgatgccacaccctcatatcttgtgtctccacttttataaacattatgtaacccctttgaactacggatgtagcactgggttgcataatacgttatcagcacgataccaagaagaagaagggtaataacacgtagatccgttttgcatctcgccgtctaatcgcgaaaacgaattactctcctcgttctcgttccgtttttgcttttctctggagaaatctgctaacgccgacttggagtcgccggcgaaagccgattagggatttcccaaaaacactagctggctgagcgcgtccctccacgtcatgccgcacacggataccccgacgagaagccgcgccgtcctgaacgcacgccggccaccccgcctccatggctgcacccgcgccgtcactggccgccgtgccactgcaacgagagcacgcagcaagcccatgctggatgcgtgtgcgacactgtttggccgccatggcagcaccaccaaggaaggagagagagaagaaatgaaacaagaaaagtgcaagaaaggggaaaatggcgcgtcacgccgtcggccacaccagcgagcaccccgcagcctgactgtgccaacggccgcgccatcgagccgcatccgcaccaggtcgcgccaaagcacacgcacagcgctaggccgcgccgcctacatcggccgcatccacgacgcatgcgccattaggaagaagaagagaaagaagaaatcgaaaaaaaaattaaaaaaacggaaaggagagaaggcgacgctggccacgccgagactaccgcgacccgcgctaccgccgcacggcaacgcggacgccacgggccatgctcacaccaagcccccgcgcctgccgcgagcggcgagccgcatccgcaccggagtggactgccgcacgcgcgccatgcatcctgaccgtcgtacgccgccgcaccgagcagcactgcctagctgcccggctgccgcgcagcgccggtcgccggccacaccaagccgcgtctcgtgcggtcgtgccgcccctcttggccgcagcacctcgcctccggccgcttcgccgcctcgctgctccggccgccccgggccgccggacggccgtccccaccggccagcgccctcgccgcacagccgcgccctgcacggccgcgccgctgccgaagccgcgcaccgccctgcctcgccgcgcgccacaccgcctgccgcgcgttgcgccaggccgccgtgcgctgcgccgcgccgcttggccgccagcgccacctgaccaccccgccgccgcgccacctcggcatcccggccaccgcacatggcaggtgcggagtcaacgggagtggagaaaagaagttaaggagaagacaaggaaagaaaaaaatggaaagaaaatagaaaaaggaaagtatctatcctgtgatttttgctgtttttggaaattaagtgcctgttcctttgcattgaaatctttgtactgtaaaccctgaatttttcagaaaatacacaaataaccctcggtatttgggatatttgtttgaaagtcatttgaaatttgcaaatatcaccgaaaatcatattatcacataaaagagccatgggacattgaatttcgaccctgactttgtatttcaggtacttttattgctgatatatatgattatgaaatttatttattgcatttacgattattgattatttgtgatgcttttattacttttaattaatatcgttgcgataaaatgtatagaattgcatattatatattggaattatttgcgggaattttgtgtaccattatattgcaacacttgtgcagtttaccggcatttaatttgcgcatatttttgaataacgaaagatgactggcatcgcaaattagaaattcgctaaatctagaatatttctgacatatttattcaatgtcgaaattacgatagagcaagaagctctacggtaccattaatccaatcgcgctatgtgcattgtctcgatgagtttgatctagcatttcaatctctcgccagtgcctccaagctactccaagcatttcaatcctaatagcacacttatcatgaattgagggagagagctcctagcctatttgtatggctatggacgaagaatctcctatgctatatcggatcggccataaaattgatgtcaggatagtaaataattgccatagctgtcgagcaagaagttcgctatgaagttaattgaatacgaagtaccggaatacctcgttgaatcaatatacttcgtcatcacttgttgcaattttttttgaataagaacattgcattaaagaaatagtccttacccaagtagagcacacattttccctgcaataaagaattatttccaatataaaatagcatatttaaggcatttactattttgttgctcttttctagcacatagttataatgctttgaattttgtgtagcacctaaacataaaagaaaaatgaattatggtccgcataaccataaataacactttaagagaaagagatatttccagagccatagaacaggaaacagtatgaccgttgctagcagcaacaaactgaatttgtcagccgagaaagtgccacggtcatattacctatggaacaaatgatgcactttatagaagcatctattgtccgtcaacctcgttgaactttctaaaagtgtgatgatttgggctacaccattttagcaatggatttttagccattttcagtcttagaattataagaataaatattacaactcgtatggtcatagcacatgtatgcatgattttcccaaatcatgaatatttgtgtgccagtatgcagcgacaggagattagtgcataaaccacatatagttctagcatccctgaactggattgcgaggaatatctgcggctcccatttggtactgtatggacatatgcgcttccgaagtagcaaacatctagtgtctcatagacaccgtgtatttgccaagactgatccagaaagatcacgtgaaccccaatagaactcactaaatcatccttagaagtccacgaggacaatgctagcattgcatttgatgattggtgaattggtagcacgaagtaccaaatatccgcataagcggactaactataagatatgaattgcaatatttgctatatccttgttgtattacccgcagtagaaaaggacatgtagtcctaaaagtagcggactctgaaagcaaatttagaccatcggcatgaacatccatcctgcaactagtgctattgcatttgtttggtttatgtgcattttccactatcataatgcattgcaaaaggctctctccgaaagtcggaaaccttttacagagatagttatgaagcctgaattccttgacaaataagaattatttccagtcatttagggggagagaatgaacccctagataggaaatgtcaggaaatatgatagtccgggtctaatgcatgttacaccgcactagtgaatgcagtttgcataaagaattaaaactatcaaatcacttcgtaaatacttttgtgatttataagagtttgactaagttgcatgaaggaaatgcaccggagaagggtgataccgaagaaagtaaaggtacccctcatcttgtctagaggcctcaaacaaaaagaattggacaagaaactccggctcctcacacccctaaagtaaccggagacatttggtgaaaacagggcaagagggaatatcatactcaaaatcacgaaaagtaccccaccgaatagaaggggagccagttgagttctgggaagtggtacggaacctcagaataggcgtaccgcaccttcccatcaagaaagaaaaccagctgttggagtgcacactaacgctggtactgcccacttcaagaagtattaagcaaagaaaaaagaagaatcatatgaaaatacatctcctcgtatatccatggatattcgcatagagtctcgtgcaaccaatagaagttggcaatgagaccgattatgggcaatgtctcttttagataacaaaactcaatggcagtcaaccatgagttgaatggaattaatgaactagaagttgaaaagaagaactcaacctgaatgttgataagcattgaaaatagaatcaatgaatgcatttcaggagcttggatcggacacttgcatcatagtacatgaagaagtactaggtcccaaaccaacacagaaagaatagaataaaccagaaaagatttgaagaaacaaactcgttcattttgaatttgagtttgatttgaaatatttggccgaatccaaatcgtgctcacacttgcagctaaaggcatgcgacaactggaagtctagtacaccagtccaaccgcacttagaaatattcatggtgcatggctttgggatagtcaattaccgccaaattgggacgaaattcccaaacatgagtgtgtcatagcagcacacgaatacttaactaattgaactaaaccgaactaagcatcgctggactattcagaacctcggcatggttttgagagatggttacccgcgacagcaatcgcgatttgaaaactatctcgatccccaccatttatgaaactaaagtagcatatgttgcatatatgcaaatgagttacgtgagaagcaacctcactaagcacatgaaccccaagctcttttatgtgcatgaattacataggagcaaacgaactaagccatgtggaagtcttacagatttatccactaactcattattgacatcttctcttgaataggtgtgtccgagaaatcggaataatgatacttagagaaatgcaaaattcagagggagaatttcacagactcattccagaatcttgatatagaaaatcaagtacccaaaaatcaatctagaaagaataaacgatgaattgggtgggttgtacactttttcccttagataagttttcccagtagtttcttatcaaggtttttagtgaggcaattcatgcgacattgcaagcgtatgctatgtactctttctccaaatttttcccgctgggtttttgtggagttttgatgagacataggcatcacgcagtgagagcctaagggggagttttaggataccgccagcccatgaaggcccggcccggttacctactaattgggcccatcactaatatggaaagtgggcaaggcattgccctataaatggagggttggaggagaggttttgtacacttgagaatgcaatggaagaatgagaaaggatgccacaccctcatatcttgtgtctccacttttatagacattatgtaacccctctggactacggatgtagcataggggttgcataataataataagcatggagtgtataatcgtctatacaagcaatgctaagtaatgtcaataattgaccatgcataaataatagactgaggcagcaaagatatatataaataaaggtaacaatatcaaggagggttgcagtcaagtttagtacgcattttataattagcatgcaattttatttataaacaaaacatttataaagcgggttcaacatgctcaagaagggggcgtagtgacttgccttgcttttcgaatactatatctttgagaaatccgcgttcgaggaatatccggaatattcgctgtgtgaccgataagagaaaaccacacgaaaccctacaaggaaaatactagacatcacaaaccagtggtgccattggattgatcttgattttagaagaattctgaaagttgaatggagtcaactggggcaagatatggatttcgaagtttaactgtatttagaaatcgatgaaaatgacttccattattggaaagaatattccgagggaatattctttcggggcccatctgtcagttgcaccaagcggccggcgcacagtagaccgggtctacggagtgcgcggcgcgatgaggtggtgggctcggcccacggctcatgggccggtacgtggacgggagtagcgggcccatttgtcagcggctcggtttggtggaccgggcgcacagaccaggggcggcggcggggcacacttgtaagtatagatggccaaaaggcccgctcggcacggctaggcacggcccaccatccatcgggccggcacggcccgatcggcacttcgtgccgggccgtgccggcccataggctgcacctctcgcccaggcacgtcctactagctgtcgggccgtgccgtgccagcccgaaggcacgggtggtccatcgggccttttttaaaataagtctatttttcgtcccttctctttgggctattacatatgtatagctaaaataagtcttgtcgacggtgggtacccgtagaccggatatagagggtattggggtacgctggtacgaggatctacgtagtacgacatcaaggaaacaagagacaaagattatactaggtcaggccccttaataggtaatagccctaatccagttgatatgggattatatggagagaaccacagattacaaagggaataatagaactcgatggtaccgacgagattgtagtcgagttgattcgactagatcacccagcgacttggctcctgtagtttccggcttcataggctgtggtcgttgtgttggctatgagattcgatccttaggtccccccgggggttgtcacatcctgatttttgtttcaggatttataaattatttaataaattattattagaatttatattaaatgttcattaatttacaagtgaagttaaatgtgggaaataaaatttcctaaatataaagcatggatggatttaattttttattaaattctccatggttaattatactctctggaatattctcggattttttggagctcaattcctaatttttaatcatacaaagagcatttcagtaattacccacatattaaattaatcattaaatggtctggtcttaatattgttaaatactttgggtgtccaagtatgttcaagatttttcttggaattatttgagcataggaagtatttttaacaattcaaagatcatttcattgattaatttaattggaaaagtaataataatcctcttcctagtcttgggccctttccggcccatctccctcttttgtgtgcacggccgtgcagccctagtcggcccagccgagtttcccccttctctttctttctttgctttgttttcagccagcccaagacgaagagtctaatttgcctccctcgacactgtttatcttctacctctagcagccgaactgagaccgatttggctcggtttttctcctccaaatctgacctttccccttgtgtttttctaaaattagttgaggggaaatattcctcttatcctcctctatctttacccccaaaaaatcggagctaatcgttgagtatctcatccgaatcgaactcgttttcgagtttatctccaaaaccgagtttttgatttcccggatcgatttcttgcgggaggagtccgatctcttcaatacaaggctataaaaaggaccccctagtcctcctctttcgtttgccccctctcccgtgatcttccgtgcctcgtagcgccgccgccacgtgctccaccccgccgtcgtcgccggccgagctccatccgcgtcgcgccgtcgcctccgtcgtcgccgccggtcgccgtcaccgccgtaaggtgcgcgggagggtggagaagcccggccgcctgacccccgaagccgctgatcaccggagccccgtcgccgccgtcgactgaagccgcgccgccgctagaccccgtcgccggccgtcgtcgttcgtcgtttggttcgagggtgagtaccgttgggttcgtctcgtcgtcctctacgtgtacatgtcctccaacgtgtacatgtcctccaaagtcgcagccgaccatccaatctccggcgaggtttattgcagagcaccagactgagaagtggcggagataagcccacgggggtcgctggggagtccatgcctctggtttttgagggggtgattatgatccaggaatggtgcgctgcagtggattgtgttatgcaaggggtaatgtcacagctcctttccgaggtaccgtggtggtattgaggcacatggtgacatgatgtgaggctgtgtcttgtgggtacagtggtacacctctgatcagagtaaaactattcgaatagccgtgcccgcggttatgggcgggttgagcaatgttttttgtgattagtctcacacctctcacaataattatggatgttatacctggtaataatttgcttagctcctggtttggagttagatctgtacagccgggtatggttgttcaggatggttgggcctgtgcagcatgggtgtgttgttcagtgttggttaaaatttctgattaattactccactgttttacttctcttaaatgttttgctaaatgctgcttttgcaaatgagcctatattatgccatcctttggtatccttgtgcacttgcatatttgctgtgtggcttgttgagtatgtcatatgctcattcttgcaataatcaatcaacctcagttgaagaaaaaggatccagaaggagaagacgtttggcttataccccagttgagctgcctgtgggagtggagccgaagccattgctagaccgttattccgctgctgttttcttttcttttgtaagtgtgtaacgttattattatgatggatttgtatattaaattgtcagtttgtgtaccttggctgattcctggacgaggattttatgcacaaataagtttggaaattactagtgaatttccgggcgtgacaggggtcccttttatatcgcaggtcaggcggtctccaagtaggactcggagacatcggaccctgcatgatatagtaacgacccagtcctatgcgggtaggaacctttccattggtgaacttcatgatggatttccttagcgtgtacagagaatgtccgtatatgcgccgatgtaccgtattgccttatagcgtatatccaagggtagagagtataccttatccgtaaccctgacagtagcccccgacttctgcttaaatgaactcgtgtaaccgatcacgacttctgatatcggagttgttgtcgttctcgactggtcgatctcggtgtggggaccgtagagacaaggagtgatcgacaacatcatgcgaagttcggagtgaatttaaattgaagtccaagaaaccgcctcgtgcaacggacctagaaatttccggcggccatctctctcctttccttggaatttgtaccgtcggtagtgtgcctatttaagggagttttgggaatccattttggagtccggctgttgcgaaaactttctagcctccaaacgttcttcatcttctccgcttctacgcaaaccctaattcgctcgcctcggcttcttctccggcgatctccaacggcgatggacctcgacaagtccacctccagtagtgcgtccttgaagaaattgtaggaggagggcactctccccagtcatgggactatggagagggaaccgggaggtactgaacctgaacccgtcctgggccgcatggttgcggttgaggactacattctctgtggttttcttcctccgccttctgagtttttccttcttgtattgaacttctacggtctttctctgctccatctgaaccccaactccatagccttccttagcattttttctcatctcagtgaggcctacattagggtagagccgtttcttgacctcttccgcttttactacgagtttcgctggatggaacctaaaaaggtatccgggtgtgttggttttcgatttcgggatggcctaaagtcgcgatacatccctttccagtacctctcttctcgtagcaaatggcgggcgaggtggttctatcttcagatagaagattcggatccagtcttcattgttcttgaggagcaaccaaacaagattccgtcttggactgccaaacccgccttgaccccatccctccaatctttcatcgatatcatcgatgacctccaagtacgagggttgtcggggttgaagtcgctaccgacttcattggtagacagatccagccgctccaggctcgagcccatccagcctttgactactctgggccggaggacgcgacccgggttactcctcggggtatttttcttgtattttggatttctctcctttcatgcgcattcctcttgacttatcgaaatttggttctcgatttgcaggtttgaacagcgcaaccgtggaccttcgtgttgcccaggtgatgattagtggtcccacgacggcgagcaacgtccgcacccctctttgcgagagagaggcggctgagcgcgaagccgcaatcaacgtgagtgtaatcgatgaccctttaccttttaattcttagatcacatcgtgacttcatgttgtgcaggctctccccctgactgacatcatcaggccgcttgcgaaccaccaggcggcggcttcgttgaaggagggcgtcgcccaggaggcgtccgacgcggccattgccgctgctgctgctgccacgaccagcggcggtaaggttacgaagaaggggaggaagttttcctccgtgctcggcaaccgccggaagacacccaccccatcggtaagcctttttggttatcgattacgtagtcgaagaatgtcgccctcatgttgtactcggtttacttaggcctcggatgcgtcttccccgcctccacgacgacagaggctggtgacaatcagcgagaagtaagtggacgaaatttgaggctcttgacttgatcggattctgtcgtcttgttatgatgaccaacatggtcgtctttcgtagggcggcgtgggcgaaggcggcgcaagatgggtctggaggaaactccagggcgtctcctgcagtggcctcgaccgaggttgtggtcgtgcctaggagccgcgaggtgacgcctagtggcccggctagcgatcttgcggctggtcgaggcccgccggctgctgtcctcacctgggaggagctccaggtcgagatggggcgcatcctcgaggctggtgctcgcggcataagtcgcgagatcgcggaggcgagggtagcggcggcgtcgtcggcgaacgagcgcgctgacaggctgacgcgtgatctggcggaggttcgcgaggacctccagaaaatgagggagctagtggccggcaacgagcgacaacggcaggggcttgagcaccgtatgtcggagctcgagaaaaacttgtcggaaatccgtggttcgctgcgggttacctacactggtttgcaccagctcgccggggagtgcggtatcacgaccaccattccggcgaatcccgacgagttctcgctgacgacttcgcggaactggcgacggcgatggaggcaatcccctccaagcatgtggccaggatcggagaggagacgtccaacgggatctacaccggggcgtgccacgtcctcgcttgcgtgaggttggcgcaccttgaactcgatctccagaagatcttggatcagggggcggctagcgacgcatgcaaggatgtgatggaaaaagttggcgatctgggggagtccgttctcccactttttgaagagtagggccgccgcttgcctgtaccccttaaccaatcgcgctttgtaaaactttcgttggttccaactgcctttgtgtatgcagttatcaccttagttttctttggcattttaattccgggtactttgtttgttgtttgtagagatgtcgacgtcgaggatgtccagcagcgcgggcaacctaaattgcctgtagtcattctggcacttgcgcttgagccgtatgtgccgcaggacgacgtagaccaggatctgcccgtggagacgggcgtggcgacgactcctttaagttggttcttgtcgtttccatttcctttgctcttctatcttgattagcttaacttaggtatttgcttgccgggcagacctcgaaagtgcgcttgcttatcgcgactgtcgcatccaatactggaggatgaagttcaaggtcgccgaacttgaggggactatgttggaagtgaagagggactgggccgtggaggcactccgaggtcgcgaggtgtggttcaactcgtacctcaggagttgttgcacaacctcgcgaggatcccgaggagtcagcggccggctatatctcgtggccgttgtcgtagacacgggtcttgatcccttgtagtactataccgtttgccctttcgacctatccgttactctgagggtgagaaaccgaggcgaagcatatcttgactcccagtccaatgtagtaatcctggaaatcggcgctgatgaattgggagccgctatccgttatgatgcggtgaggcaatccatatctgcaaaatatccccttaatgaatttgatggctttgtcggccttgatttcccccgtgggtgttgcctcgatccatttggtgaatttgtcgattgccatgaacaagaatttgtaaccgccctgtcctcgtgggaatggaccgagtatgtcgagcccccagcacgagaacggccaagtgagagggatggtttgcagtgcttgcgctggtagctttgtgtgtttgctatgaaattgacaagcttcacaccgttgtaccatgtcgcaagtgtctttgagggcggttaggcagaaaaatccttgtcgaaaagcttttccaaccaatgtacgactggcggcatgtgatccacagaccccttcgtgtatgtcgaggaggaggtgtttgccgtcgtcggacgagacgcatttgagaagtaccccgtttggcgcctttttgtatagatcgttgccgatcatacagtagatttttgcttgacgggttattttctcggcttctgcgtcgtcctcgggcaactcgtcgctgcttatgaatttaatgagtggggtccaccagtcgtccgtggtctcgatgtcggcaacggcgtgctctgcctctgtagccccctgagctgatgtcgggggtgactgggctatcttcgtcgtttgcctctttcaccgatggctttttcaggatgtccagaaaggtgccgggttcgagtggctctcgtctggatgcacgccgtgctagatcgtctggctcgatgttgtccttgcgatatacgtgtcagacctcgatcccatcaaatcttttttccagcttcctgacttctgcgagatacttggacaactcagggctagagcatttgtaatctttgtgcacctagtttgcgactagttcggaatccccttttacgatcagtcgcttgactccaagtgcagctgcagctcttatcccagcaagtagcccttcgtactcggctgtgttgttggtcgccctgaagttaaggtgaattgcatgcttgaactgatctcccgaaggtgatgtcaagatgaaccccgcacctgctccttggctgttgaacgcgccatcgaacaccattatccatgtttcgttgtcggtctgactgtctaacctgttttcaggcatagtccaatcgtctactaaatcggtgagaacctaggacttgatggctgtttgtggtacaaagtggacgtcaaacaggcttagctcgactacccatttcgcaatgcggctgacaacgtctttgtttctcacgacttcgccaagagggaaggcggagacaactgtgaccctgtgggcttacaggtagtggcgtagcttttttgacgtcatgattactgcgtagagcagtttttggatatgtgggtaccttgtcttcgcgtcgtggagagcttcgctgatgtaatagactggtctctgcaccttttctctttcgacaacaatgacagtactcacagagtagggcgtggcggcaatatagaggaataactcttcattaggttggggagcaacaagtatagggggatttgacaggtagcgcttgagtgcgatgaacgcctctttggcttcctttgtccatacaaatttgtcttgcttttttagcagtgcgaagaaaggttgtcctcattctcccatcctagcgacgagcctacttagtgccgccatgcatctggttagcttctgtacctccttgagtcttatgcgcgacttaatgttctcgattgccttgatcttcttggggtttgcttctattcctctgccagagacgaggaacccgagcagtttgcccgacggtaccccgaacgtgcacttctcaggattgagcatgaggcgatatcgtctgaggttgtcgaaggtttcccgtagatcatcaatcaacgagtcgcctgtcttggtcgtgacaacaatgtcatcgacgtaggcctcaacattgttacccagctgatcgctaagtgccccttggaccgtacgctggaaggtatttcctgcggttatcagtccaagtggcattttaacgtagcagaatacaccgaacggcgtgatgaatgttgttttctcctcgtcctcttttgccatgctgatttggtggtagctagagtaagcgtcaaggaagctcaagagctcgcaaccagctgttgagtccactagttggtcgattcgagggagagggaagtgatccttggggcacgccttgttgaggtcggtgaagtcgacacacatcctccacttcccgtgggccttccgcaccatgactgggttggctagccactctggatggagtacctctctgatgaagccagctttgagaagtttatcgagctcttctcgtatggcatgtttccgatctggtgcaaatctccgcagtttttgctttactggcttggcatcgggtcgcaccatgagtttgtgctcaatcacctccctggggacccccggcatgtcggacggctgccaagcgaatacgtccgcattgtcgtggaggatggtgatgagcgcgagttcctatttctcattcagtgatgccccgattttgactgtcttgtcggggttggcactggagagtggaacgattttgattgcaccgtctggtttcggcgtcttagtcgttttgatcactttcttgggtggctcggctgtggcgggtgggctgggcgtgtgttcgaccatgtcgaggctccgcttgtcgcattggatcgccagctttgcgttcccttgaatagtgattgttctcttcggcccgggcatcttgagtacctgatacgcgtagtgagatgcggccatgaacttcacgagtgcagttcttccgatgatggtgttatatgctgtgtcaaactcagcaacatcaaatgttatctgctctgttcagaagttgctcgcttggccgaaagtcacaggaagcgtgatcttgcccaatggcttggacgaagactgaagagtgattccatggaagggttgatcggtaggtgtctgttgacaaaaaaatcgaatacaccggcctgggagatctgcttagctcctgtgtaggtccaaatatgatgagatgcgggcgtgccagtcagtttgatcctgcaactgacaagatatgcaaatagtagatcaaaacagccgatcggctgacaagccgatggagtagttccagccgataaccgataatagccgatgccgataccagccgatggcgatagggtttaagaaatcggctatatgtccaatgtagataattatataaaggcaatcagctgataatgatgtaataaaataacaatataacccaatataaaccaatcggctagcaatgatatgataaataagcatcgatccgaaagtttaagcacatatcggctggaggtccgatgtcatgaaatccacaagattagattaaacagtgaaacctttgttgtcatcggctaaatccaacttatatgtatatgcaatccttatgagccgatgcaacgtccagataattcaacggctgaaaccccgatgaaacccttatcggcaatcaagaagcaggctagagattatggttctaagcacaacttagtagatcaaacttaactgattcagcactaagtatgaaaagaaacacaatatctagataatcaagccgatgactgattttcagggtggtacatgcctaagctaatctaatctagcaacgcgatttagccgatatcggcagaaaccctaaaacgagaagcagccgatatagctaaattgatatgctaagactagattaatagagacatatgataaataggtaggcaaatatatcatccaaactagagcaatccaagaggtcgaatgtactgatgcagccttgaacgacgccgaagtagatgagacaattgcctgggccgacggaacattggacttaccccttcaccagagattgaacaccgatgcagccccacgtcaggtgccaagtcccgctggacgataaaataaagtagaaaaggtaaaaggtggtgatgcgccgaattgtattgatcgtagtgataaattatatagacccagggtgtacatatttatacccatgggttgatacaagtccttgtcggacaagaaagaaactaacctaaagataaaaggaaaatataaagtccttatcggacactaaacacactttcctaaagataaaaggaaactaacaaactattcctaattaatagataaactgccatgctacatcctctttaaactcggtcacttagggataagcttcctttagtagattgatttccttaaccgaatatagcaggaatccaactattggcgacttgataactcccatcggctgattccgagatactgtagccgataatgattctaagccgatgacgtctttgccgattaccaaatttcactgttaacagtgtcaactcgcttcgtggaatttccattgcgtccaaggtgctggcgaagagaaggttgatggagctgccgccatcgacgaggactcgcgctaccttgatattccgaatagtgggttcaaccacgatcggatatcgtcctgggataacaacagccttggggtggtcctcatctgagaactcgatcttctgttcagaccacttcatcttgggtgcaaccccttgccatgtcgaacaaacctcacgctccacttttttgtattctcactttgaagattacgctgtggaacctccgaagccgagtccgactcctgagtggttgcctcagtggccttctcgactacacgtactcgcttgcccttctccaaagctagttgcttttccagcgactttttgaagatgaggcactcctctagagaatgtctgtccgacttgtgtatggggcaccatattctcttcgtatcactgccttgtgggtctgagtgtttgggtggtcgcttgtatttagacgcgaggacttccgcttgagctttcctcttcccactcttccgcttttcttcttgcttggttcgagtgcgtccttggctggcttcttctctcctcctgcctttgtcttgtcactcttgcgtctcagtgcattgtctgcatgggcgcatcgatcgacaacctcgaacaaccttcgagtagttgtgatttgccttgttgccaactcctgggtagtatagcgatctctgacaccagttttgaaagcacgaatcacagaagcgtcggtgatatcggggatcgtatttctgcactcactaaagcgccgaacatagtcccttaaagattcacccgaattctgtgttaatgtgtgtaaatcgtcttcgatctcgtggcgcttgtaagttccttggaagttagcgacgaattgctgccacaaatctgcccatcaagagatcgagtagggtgggaggtgcatcagccacgaacgcgcagaacctttcaacgccgttggcaaatagtttgctaacgcgttgtcgtctgccccggcagcgtatagtaccatggagtagacctggaagaattcttcagggtcagtactcccatcgtacttctctattgctccgggtcggaatctcttgggccatcggacatcacgtagagaacggttgaaagctctacacccggcgctaggggcggtgggttgtcggcgattgtgtgtcctccgtggatgtctatcggataacgaagatgaagatgatgacgatgatgacgatggttcactcggctccggtgtgcgattccgagggcgacgtacaggttctcgagaattctgtcgtcgtccaccattgttgtcatggcgccgatccccattatcaccaccgtcatgttgacgccctcgaccagcatcgtctggtgtccgctgttcgtgattgtcgcggtcgcggtggctgtgacgattatggtggtgttggtcttcgttcgagcggcctcctcgctcttcgttctcgcgacgtcgtaaagaaacacgatgtcgggaacgattcttgttgtcttgcgcgtgtcgtgcttcttggcggccattcagatagtcgcggagatcgccggtgccgcgaggtggaggggtagctcgtctaggcgacgtccgctgctccggtggttcgccgtcggcactgccagctgtcggtcgttctggttctgctctggtagcggcctcttcgaatgcgttactgagattggctaccgattcccgtagtcgttctgtccatcgtgcgagatcatcgttaagcacggagtcatagggagcttctatcagtattgcgttgacggtgccgagatgttgggccggcgtgaccgtctggttctccgcctctgcgttagcatgtgtagacgtgctagtcccaccaatggcaaatacgtcacgtgttgtactggaagatgacgagccatagtcttcgagcaagtgtaggactgatggctcgtggggatcaatgtcgattactccaacgaatcgatccgaggtcaacgtcgcttcttgttccttgtctgtctccttaagagagattcctgactgctggaccttaggaagcgtcgttctcatggcgcggagaaagacctagcagcttgagaagtcgtgattcttcgtcttgtgaataggacaatagacatcacgagttggagaagtacgctggattccacgctctttgcaagcacgaatttcagcttgtacgttgagaaaaacccagcaagcttgcaagttgtgcttcctggacttgtggataaaacaccaggactttgttacctcggaagttgtccttgtcggctcgcagttcttgtcggaaggacaaggtttggccgcactaggaaccttctcgggctcgtatgacgtcgatgttccgttctccgccacggcgggaggatccttcgacatgggatcatccgggattatagccacggcgttctcgtttccggtcattgatgaaccagccgagattggtaccgtggtgtaaaccgggaagacgatttcgccgacttgagtccacaccagcattgttgaaatagggactccttggatggggccggtgttgacgccattgtcgacgaagcttgatgtcatagtagtagaaccttgagcaccaagtccccctacctggcgcgccactgtcgacggtgggtacccgtagaccggatatagagggtattggggtacactggtacgaggatctacgtagtacgacatcaaggaaacaagatataaagattatactggttcaggcccctaaataggtaatagccctaatccagttgatatgggattatatggagagaacaacagattacaaagggaataatagaactcgatggtaccgacgagatcgtagtcgagttgattcgactagatcacccgtcgacctggctcctgtagtttccggcttcgtaggctgtggttgttgtgttggctatgagattcaatccttaggtccccctaggggtcccttttatatcgcaggtcaggcggtctccaagtaggactcggagacatcggaccctgcacgatatagtaacgacccagtcctatacgggtaggaacctttccattggtgaacttagtgatggattccttagcgtgtacagagaatgtccgtatatgcgccgatgtaccgtattgccgtatagtgtacatccaagggtagagggtataccttatccgtaaccctgacaagtctattttcccttcctcctctttgggctaacatatgtatagctaaaataagtctatttttcgtcccttctctttgggctgacatatgtatagataaaaaaagtctattttacatcccttttctttcgtccattgtatacaatatgtctatttttactctcctattttttttgtatcgggcttggctgcttgcccgtcgtgtcgggccggcccaacgtgccggtggaggggcccaggcacggccagatggtcgggctgggctggcacgggcccgacctccgtcaggctgtgccgtgcttgggccagaccaaaatgtcgtgtcataggccgggccgtcgggcctcgggccttttggccatctatactcgtataagagagcctaaggaaaaaaaaggtggtttaataaggagatttagccaaggtctggtctgcgtgtcagtaaggttagaggaggatttagggagaggattactgtagggattagattagaaatctgttgggcccactttgtcggtgacccactcctctcccttttcctctcctctttctcgattcttcctcaccgctctactccctctcgttccccttctcacatgcgtgcgtgcccgagcgggaggcggctggcacgcgacggcatgggtagcggccgagcgatggcggcttagcgcggcggtgcgggagggcggcgatgtggggaggaaggcggtcgccgcggcgttgctagccggcggtcgggaggaggcgcctaggcggcggcgctcggcctggcgcaccggcggcgggaggcggtgaggagcagtggcgtgggaaggaggttgccgcgggagcgaggcaggcggcgttggggatggaaagggtggctggtacagcgatgagaggcggaggaggtgatgcggtacggaaaggtggtcgctgcgggagcgtcggccagcggcttggaggaggaggcaggcgagctggatggaagtgaagatggcggtgctgcggctccctggccggaagaaaatcaaggcggtcgagggaggagctcgcgcaggctggcgtggccgtgcgcggcggtgtcggtggcggggagaggatgttggtggcggctcggcaggggtggtggtggtggatgccgaggacgcacaggtccggggcgctcgacgtccacaaggcgttcgtccgcgcgtctcagtctggcgggagggcgagggaggaagcagatgtcgcggccggtctttatactctcttcgccgtcgtgcgtccgtccgcgcggagtggggtcgggacgccctgtggccatggcgccataaaatgggctgccgttgcctcccaggctctgcgcggtgaggacgagctgacgtttgctgagcgcggcggcaacggagtggttggggcgaaacgggcagagggcgagtccgtttcgggcactacggcgtgcgtggcagcggcttatttggggttgaaggtggaggctggtggcatgaggcggtgtggaaattatgggtaccccatacgcacacggcatggttatccgactagttatagaggataacttgtatctatggaatatgtaatagatcattacttgggtattacgtttccttgtatattatggaacggcctagagtcctggtttggtaatattgtaaaatagatttaggaaaccgataccgtgttgcttaaggtttttatcttgtaatcatgcccccatcttatataaggtgggcaggaggctttctagggggcatgaacacataagatcgtcagatctatactacacccggcggattcaaatccccaaacaggagtagggtattacctctcattgagagggcctgaacctatctaaattcttgtctccgcttccatccacttttaggtctcgtgtgctattccattttattattgccgaattcatgttttgacagttggcgcgtcaggtagaggtgcgtcgagtttctattgacaagtgcgatggaataaattctcaggagtcgtcggcatcgtcttcgcttttatagcgtgagatccactgccgacgacaccaccttcatcttcggactagttcttctcttctggagtctgcctttcattgccatcgccgaaaattccgatgtgatcaacataaatagccaagcgactaatcaccgatccaatctaccaccggatgtcagtggccaaattatttccctgatgatcaagatttgaagctatcaactatcatgagtatccacagcccgccacgcaagtgcatatttccatctgacgcatgcgcatgtgtccaccgcatgacaattggctgaccaatcaggaagctgctagcaatggcaagcaatcaaattccaatcgccaatgttttttctcgtcgatatcaaattttctagcgagattcaattactacatggattggagtcgaggtggactccgtgtcagctgatcagactcagccatgcataatttggactcaggtctatcgttttaatttctttacataaactagatcaatattaatttttctagttatttaattcacaaatctctaattatttttgatttgttatttttgtgtgcacatgtggcatccgccttcacggttggtgtatgtcgcgcccagaagttcttttccctagcaaaaattcaattaataaatggttggaagaaattatttctttagaggcaagagagaaaccctaaattaataaatgcaaataataatcggaatcggcatgtggaatttttcttggattctacatgtcaaaatatgctaacaggatttttagtgcaattttcagagcattggaaataattttaaccaattaaaataagcaaagtgcaatattaaatccctgggaaaatcctttttccttttatcttttcttttccctcctttttccttttcttgggccgccggcccatttcctcccgcgccggcccgctcctccctcccactcccgaagttcacccggcctccctctccctctcgggcgctgacaggtggggcccacctgtcagccctttccctaacctccggccgcccacgcccgcgccaaccgccgtcgaaaccaccgcccacgccgccgcgtatcccgctgctcccgcgcccactccgcccgtgccgcacgcccacgtcgccgctcacctcccgctagctcgcgcgcccgcaaacggcgggggatttgctcttttccccactctctctctcctcctccacctcctccactactccggcgaaattgcgccgttcccggccacgactcgccgccccccctcctatttaagcacgcacgcaccttcctctctctttttcctttctcggccgagccctcccgagctctccatcgctcccgcgcctctcatcccgccttccgccgctcgccgccaagctccggccgcactccgccaccgctagagccgtcgccgcaccgcgccgacgacgccgccgggttcgcaagcttgtgcgccaccccgtccgccgtttccccgggcaatcccgccgccggagcttgcttctcctcgcgcgccggtgagtaccccatggccgccgccttcgaccggcgaatccgctcgctgttaaccacccctctccctctaatccctcccatcttgttccctaggaggtctcggagcttgtccgcctatcgtcgccgttccccggtcgctcgccgtcgccgttcgccgtcgtcttttccccccacgccggccaactcgcggtgaggcgcccctccccctcttttccccttcctctccctcctagcgccgtgccgggccgagccgccgcttcggctgtgtgccgccgcctttgcgccgccgtcatccgccgccgcttcccgcgcctccggttgccgtcgccggcgaccgtgcgtgcgcggcaccgccctcgccataaccggtcggccggtttgaggccgagccgagccgaccgggcatctcctcgtccccatgagccaccgctcggtggggcccgcttgccagccgcccctctctctccttgagtcactgacccgcgggtcccgcgtgtcggcgccacccctccttgtgctgacgtcagccctgggatgaattattgcgcaataaattgattaagggtttttcttttatagtaaaaacacagataatcttctaaaaatcataactaattcatccgagctccgattaaatccattcaagtctcagtaaattcataaaaatgtgtagaatccattaaaaatggctttgttatctgtttcagtagtcttatagcatgttttgcttgtgtgctttgtttgtcgcgtagatttcgcccgtttcgtcgattcgtggtttctcgaagacgttgctgtggtctcatcagtgcgagagcaaggcaagtcatgcaatacaattgatcatattgtacccaatttacaaatatcccgcatttctattaaatattgcattgttttacaatatcatgtgagatgggtcctattactcagctatatgttgtttcccttacgccattgatatcttgggtattaaaatgactagatgttggtttaggagatgcttagccatgcttagttcaactagtgcacaaagggggatcacattaaagcatagacttgattattggcatagctttgatttagtgccaccgtaatggtattggttaattaaaatacactacatggtgggctgtgggtgcatggttttgctagtcgtgcccatggcgattaaggaccggttcgcgggatgccctggaataacttatcgtacttaccacaagccagcgtgggcaacggctgggcttgtagtgtagcttttctctagccgacgtacccaggcgagggtgggcgtgatggagttgggtcggccggggtgtccggttgatcggcttccggattcaccgcggcacgaaaggggggctgcctgttgcctgctggggacgggggcgaaccctaaggtgtggtgcgatcggttagagggggttatgcgaagggtcctgtcacggcctctttccggtatgtcgtggtggcatgtcggcgcacgggaacgtgtcgtggggctgtgtcttgtgggtacagttgtacacctctgatcagagtaaaactattcgaatagccgtgcccgcggttatgggcggtcgaccagattcaccgtgattagtttcaccctagttagcttttggaactgattagttcaggtggtggtttgggcctgttgcaacgtggtgtaacgttggacagtgattggttaatatggattaattactacaactgttttactgctttcaactactgttttgaaatgccggctttatgcaaaagaacctttagcctcccttggatatatcttgcatcatacctcctcttccggtatgacttgctgagtacagtgggtagtactcagtcttgctctcttttcccccacaccagagttgaagtccttctcagttgaagatgtctcgaagaggttggtttcgtcgctgccgtcaaggatgcctgtggaatggagtcgcccgctgcaggagtcaagccttcaggcttagctcgcttttatctttttccgctgcatttgtaatcttttatatttttgtaagacgtggatctgtatgtcaacaattgtcgtttgtgtaccctggctggtcctggacaggggtttaatgcacattcagcttagaaattctggttcgtgaatttctgggcgtgacagtgtactccgcgccgtcgctgatggcgacattatcttcaccgctggttgccgtcatcaccgctgaccgatttctccgccaccacgattggcttattccgccgccatcgctgatggcaacattatcttcaccaccggctgcagtcatcaccgtcgaccgatttctccgccagcatggttggtgtattccgccgccatcgctgatggcgacattaccttcaccgccgactgctgtcatcgccgccgaccggtttcttcgccaccacggttggtgtactctgccgccgccgctgatggcgacattgtcttcaccaccagctgccgtcatcgccgctgaccggtttcttcgccaccacagttggtgtactccgccgctgtcgctgatggcgacattgtcttcaccgccggctgccgtcatcgccgccgactggtttctccgccaccatggttggtgtactccactaccattgctgacggcgacatcatcttcacagaccggcttgccttcactgccaccgactggtgtctctgcctacacggctggcctattatgccaccgttgttgggcttctacgacttcaccgtcggcttgcctctatcgctgccgactggtgtcttcgcctatacggttggcggactcagccaccgttgatgggcctggtcatctacaccgccggcttacttccgccgccgctgaatggtgttttcattgccattgatggacgactttgttcccacatcagccacctctgccgtcatcaagaggaatattacaaagctaagtcatcatttttccttatatgatattttccttatcctctgcctcactacatcaactggttcgccgttgacttgtgagtcgggggctacagatgttatatcatattttttaaacaattttcataatatttatcttgattgcttgcgacataatctgagtacaaaagtgccaatcgagttatggagttctatcttcctatacttttcgtttggtttgtcgatggatagttgcctttgggctgattcctagcacccgggggcttattggatggaccgagtaacgcaaggtgctaagtattattaggaataaatcaaaagcatagagataagataaatttattttctgctctttacaattacaaaagtacccgagtagtaaattctgattcgtgaaactttgttccattaatgatgaactcatgtcactcatatgcatgtttgggaagtgcctaggccgactcccgatgcttgtgggctatgactagttggacagagtgtttaaacgtacggaatcatctgctcggggaaatcaaaattgacaagaggagaaatacatatttataaacatttttaaatacttgaaatttcctcgagtattatatttacatcaaatactactcatcccatatgtttgttctgcaggatccagatccagatatgcataaaagagattcatggctttaaacttatctcttacgctccaggaatggatcagtcagaacatcaccaaccggcttgccttcgccgccgccgactggtgttctctcctatacggttggttggtcacattaccgttgttgggcgtctacgtcttcaccactggtttgccttcgccaccgccgactggtgtctctgcctgcatggctggcctattatgccgccgttgttgggcgactacgtcttcaccgaccggctgcctcgccaccgtcgactggcatcttcgcctacacggttggcctattatgccgtcattgttgggcgtctacgtcttcaccgatcggcttgccttcgccaccgccgactggtgtctccgcctgcatgactggcctattatgccgctgttgttgggcgtctacgtcttcaccgatcggcttgccttcgccgccgccgactggtgtctccgcctgcacggctggcctattatgctgccattcgactagtgtctccgcctgcacagctggcctattatgccgctgttgttgggcgtctacgtcttcaccactggctcgccttcgctgccgttgactggtgtcttcgcctgcacggttggtttattatgccgccgttgtaggacgtctacatcttcaccgaccggccgcctcgtatgacgccaactggtgctatcgtcttcacggctcgccacgtcgctgccactgcaaataggcatcatcaccttcaacgcaagctgtctacgtctgctgccgactggtttcttcactttcatggctgcatgattctgccagtgttgattggccttatcgtcttcaccgccagtcatctcgtctgttgttgactagtgccctcgcctctacggctggtttatactgctaccactactgatggatgtcatcgttttcattgctggccgccttgtctgacgctgactggcttgttcacctccacggctgcgcgtcttcgtcatcattgactggcgtcatcgtcatcgccggtttgccttcggcgccacccatggtgtcttcactttcatggctggcctattttgccactgttaaagaacgtcttcgttttcatcatcattctacttcttccgtcgccgactggttatgccgccgccaactagtgtttttatcttcacaactacgtgtcttcgccaccagtttgcttctgttgccgccgactcgtgctaacgtcatcacggctatgcaactttgtcaccatggtggagctatttcatcttcattgtcttcggcaccggcaaattctattgcctctacttttggtgttccagtattcaagatttctacccggacatcctcaatacatatcttcactcaagtgatggctactcgacgacaagaagctatagttctcgactctatgttcagttgctttccaactaaccgaagagtcgggggctacacaaatacaagactctcaaaattcgacaagctgaagaaatcaattaatcaaccaacgagtcaactccaggagtcattatcttcatctttgtttcggagcagacattctacttcagcaactccaattatttcaccggcaattttggtttctagatgctgccatagtctactccaaatttctcaaagtatcaagttcaagatttaatctacatgttcaggagtttggagttatcaaccaatcagcttaatttagacgagttggacaacaacatctactttcctccaagtgaagcatctacaacaactataacactaagttctgcagtcatctttgtaaattaagaagcgttgcatcagtcttctttatgcacacgctcacatcaaggaaactactcgagctttgatatcttctcaacagtttgatgaattattgtcactgacatcatcaccagcacctctgcttcatcggccctgacatctccgttgttgctaatggatgaccatgtcttcgccgatttattattttaccttcacggttgacctactatgcaaacgctgatgagcatcttcttcattatcatcggctgctacaccgctattgtttggatcgccaacattgtcatcttcatcaacatcctgtcaagcctcttcaacatagcctactctgctgccgttgatgggcaacttcctcatcatagccggctatctctgttgccgctaatcatcattaccgtcgccgactattttcttcatcttcatgatttgtggatttcgccatcaccgttgatgcgcgtctacgtcttcattgtcagcttgctttcatcgccaccgactgctctgtcgttgttgttgggcgcctttatcttcactgctagctgacctgactgctgccgactggtttcttcgccttcacggctatccgacttcatcacctttaattggtgtcactgttttttacaaccattgacatcttccgtcacctctgatgagcaatatcatcttcatgttggtcatttcatctccatgccaactgcgtcaactaccatcaatgaacaattgtgactacaacagaaggataagctacatgcataggggctcatcaactcaagcgcgaggattatatcttcaatttggaattattctggatacattcaacatgaatttatggtcatgagtcgatttcttatgctcaacgactggactattcattattccccacaagggccatcggctgactatttgcgccagttgggattctattatcacatctactttgatattctccatgagggataattacttgtatcaaaagctattcagatgagatatgctctacatcacctaggatatttatcacttgtgatcatattaattggagtgttctacacgtcatattttaagggtattagtagacatactttaggtctaggcctaatatgtctgcagcccatattttcaggtatggcctatcatgtttttttagggacttaggcatctttttgcttacgcaaaaatgcgcgtgatcaagtgtccaataccttaaaatccttttataccgcagttactcaacttttttggagttggtacaatgcattttaaaatgtgcctagcagtgtagttttttcatagctgtcctactgacttttttatacagtcaagatgctgtttgggtttataaagcaattgattggatacaatgtcattgctttttgccacgtaagtgtgcatttttattgaccaatattatggcttaggctgattatatattgtggtcattttctaggcggttggtaaatcctttatgagtttatttactcggatgttacaccatatatgccatatatttccaggtgtggtgaaaccatgtgtcttttagggacttaagtacatctgttaaagcagtgtgtgcatggtgtgtgcccaatactttggaaatttctttattcactgcatacaagcttctttataactgttttgctatgtgaattttcaaagatgttgtcaattctaggttgcacgcatcatattttacaaagcagtcggtatatcacttggatcgtgttattcggggattcacaccgcatatgctatatattaagatcaagtcacttggttgactataattatcaaaagctactcagttggttggattatttactccatgactatatgtttagtttgctcaactaaccacatagtcgggggctaaacctattaggtgcatcgatgcacctaagtttacattaggttatttttcagctctccacagtcttcagatttggtaaaagtactcgggagaccatggcgaagatgattgaagcactcggctttggagtaatctagttcgagaaaagattatcttttcgactgtgaaggtctcaagggctactgtggaaattatgggtaccccatacccacacagcatgtttatccgactagttataggggataacttatatatatggaatatgtaatagatcatgatttggatattacgtttccttgtatattatggaacggcctaaagtcctggtttggtaatattataaaatagatttaggaaaccgataccgtgttggttaatgtttctatcttataatcctgccctcatcttatataaggtgggcaggaggccttctaggggcatggacacataaaatcatcagatctatactacacccggtggattcaaatctccaaacaggagtagagtattacctctcattaagagggcctgaacctgtctaaatcttcgagaagaagaaaaaggaggcgggacgagagtggcaggggggaggacaggagcggcaggggccgccattaatggcgatgtggcgcttgtcctctcgtccttctgtggccgggaggggcgcggtttctgccgctagcctgctgggccagcccgcgccgcaaagcccaccagctatgtccgcgagcccacatagatgaaaacaggttgatgtcgcggacaaaatgagcccagcggcaccgccaacccgtccgcaagaagtccaccaacctctcatccgctagatcgccaaccctagccggcgccatcgcccctgccctcgattattccccccttctctcgcctcgctccgagcaggcgtatgcgtcctgaccaaggtgttcgacgtgttgccgcaggccggtggtggactgggcgaaggcggccggcgtggggcaattcgtcagcagcgccggcatctacacgcccagcgacgagccgccgcacatcgagggggtaagaaaagaaactaattacagcacaaaatgcagagtctgtcgatcgccggatgattggctcgatgagttgactgactggctgactgactccggccatgtcggctcgccggcggcggcggcggtggcgacatgcaatgcaggacgcggtgaaggagaacgccgggcatgtcagcgtggagaagtacatcgcggagcagttcggcagctgggcgtcgttccggccgcagtacatgatcggctccggcaacaacaaggactgcgaggagtggttcttcgacagtaaaatcacccaaatcccgccaaccaaattctcccaaattccataccctcacaccaaaatattttcaaattcaatacaaactggaagagtttttaaacgagattttggtcgcgagttgcggtgcttgcatgtgcatgtagatttgacattgtctaggctcatttgttaagccccaattgacttagttgattgagcttttttttctctcttttttatgatggtgtgctcttcttgatggcctttttaatgtactggtactgtaatcgggcagtaagccatgttgtcttcctgtgctcttttgagagaacaaaatgggcataaagcccatatatgtcataacaaaactaggcttgctgttttctttttaagaaaacaaaatgggttcatgtattcaatgatcttctgtatgctgtttagcagcaatttgtgtttgcggtttgtttgcgggttgtggtctggccgcaaatagcccagcggacatgatgtgggttggtgggttgccacaatacatcttgcggatgctgcggacaggttgcgggtgcccgcaacccgccccacctgcacccttacccggtgcaaagcggcgcacggctcggctcggcctgttggcgtggagcaacgcggcgcacagcgcggagcatgggaggaggttggtgtggtgcagcggacgggattggcatggggtgcgacacagctggggcatggggcggctcggtggaggtgggaggtaggtttgggccttggtaagggaggggaggggtataaaatagttattttgtaggggaacacaatagttttgctatatatatatgtctatctattataaaaattgaaaatgtttcggtaggacaagttggcattggcgcctcgcctaatcgctcatgctcttgcaatattggaattggatgggaccgacgtctttgatgaggacacatcgtcatcgcttcgtgtttccgtccggcctcgctcctgtgcatgtgtgtggcatccgcgtcactgatcgactcccttccagttttttttacattaggatccttttagaacacttattttataaatagatccctcaaaaaacttattccaggtatggaccttttcacgacgccaacgtcattggcgtcgtgttactacggcaaggcgccaatgaagttggcttccgtaacccttgccactgtgattgcgaaaatcgcaaatgctaagaactatgacgccatcatcattgacgtcgaggacctatttgtaaaaattttagttacaaataggtaggtcctctgaggacctatttgtaaaatatttttttatggataggtcctccgaggacttatctataaatattatatttgcatataggtcatcgacgccaatgacgttggcacagtggtacttaacatttgtgatttttcgtgaccatgatggcatgggttacggcgccaacgacgttgacgtcatgaaaatgtctatttccggaataagttttttgagaggtctatttgtaaaataaattttcaaaaagaattataatgtgaaaaaaggtggactccctttcctttgcgcgcattttttttttgtcaggaaacagcaggagaggctcctactatggtaatatattaaataagggaaagatatatacagagaaaaaggaagaaagaaaaaagaaaatatgttacagggttattgccctttgtgcccatggaagacgtgtgaccctgcgtgtgcagcgtgagctggggtggagctggacttggtctcggcagcggatcagcgaagacgctagctgctctatcggcctcctggaccaggtgcacggtgcgccgagctgcgaaggagacgataggtgaaagaaataaaaaagggagaagaaagagggggtgaaagggaaatagaaaaagggagaaatgaatagagaaaatgcagggaactttctgcaaagatacgaagtttgagccatttttaattccggattcgaaaggaactctatacctccgtccgtacaatacaggaggaaaatggccctgatcagcatcagggcaagtactataatactccatatgttgcctctaagagtgtcacattggattgagtgacaaggtggaggagagaagtgagtaagagatgataagctacccctaaatcaagagacaacctccacacaactttcaagaaggatgtgagagtagtagagatattggtttttgtgtattagaggtgacatattgtatgggttgcctcttagtttataagtaataatatggataaatttagaggtgatagtcacatctaccataacacttgccctcagtggcccatggataagggcataacacttgcccttagtggccccatggataaggggagagtcggagagatacaagtctcgggtcgttgcttctcggcgtagtgggcaccgatcgatctcgtctcctcccgaggcggcgtgggcgtggcgatcgaggcgagccgttgcatccgccctcaccggtgagcatccgttactcagccgcaaactatttctccaaagtgacgatctttttcttttttcttctggaatttgcataaccctagctaggttctcttaaagttctggcttaatttgcttaataaccaatcttataagtgagggagggggactaataacagttttttttgttctaaaaaaagttaaatttctgttatgtcaggttagatccgtcctcgctaacccaacgccgacgagaagtttgcagtgctctagtatgtgaaacggatcgatttccatttgagcagcagcaactgctgctgctttgttttggttgatatgggcatggacatgcttgtctcggcagcattggaggaggtgtgcgcccgcctttcgcttggtctcccagtaactgagatgtggacagcactctccagcgtgttcaacatggccggcctcccaatggacctggccgtcaagcgtgtcctctttgcccgtctcattgcactccctgtcatcagcctcgtggttgagggggtgctcgcccacccgccacggatggacatggaggaggctgagcgatatggcgcacgactgcttgcgagccgtcctctcagggacaacttccttgggatttatgaccacaggtgctctgcttccaagctgagtgacatccagaggaagacgttagaattgatcggggcaagcaggtgcgctctcttgtttagcataatttgagcaaatcataatgattcctagtacgtcttatttgttttttacttcctactgttgcatattattgttgttgagttcctaggatgatgtctttctgcaaccagtacataggaatttcggatagccggtatggacatttaactcaaaatatggtgctgcaatgtaatccgatgtcaacataattaacaatgattaatttctaatgtcttaaaatattctcatgttgattttgtctactattcttcttataagcacattgaagttcctagaagctagaacctcaactgttggaaatcaaaattgtataagtagtgatgagtttgataagaaaaaaaaagcaaaacgaggacttcgataagaaaaatgctcagtgcagtgctaatcgctgatacagaatgccctggctgagggactcccacaccatttttttttttttggcatcagacgcccacaatagttcactgtctgcctgatcaaagtgctacaccatcagtttgccgcacattttggttgttaggtatgcattcatctaaatttccttaagccacgtgtgctcgctgccagactcctagtacagctcacttgcttacataccatctcaccctcccactgcttgctgccaccagtctatcaccatgtcagtaactaagccctctaaataagcatagtgtagttagttctaagctgggaagatctgccaagctatcccaaagatcatcaggaacatctgtgttgctgcaactggacttggtactcccatcaaggtccatgatacatgtttggagcccataaaatccaatctcctcaagcatccttttgtccatctgcatgcacaggtgaaaaaaacgtccctactggttgtcatgatggtaaattttcatgccagctagagcttagaagtgaaataaaattaccgctttaagaaaagtattccaggtactagtatatactgaaacaaagaatacacacaggtgatgatgcttatcctttgtctagattcttgaaattgactggggtggtatgttatctcattgcatgtgccttttctagttattctaatagaactaaaacgacaacagtagtagtccattgcacatggagattcatggcaaaacatatttagcaacctgctagctagttgctgccaaggtaaaaagtgatcttgatgtttcaggtcctcattggcttaggaagcttcaagttcatttcttaagtttaaccatgcatatctatgggaatgtggcgcgctaaagtgtggacttatttacaccctatgtatttttgtgaacatcagcatgcattccagttttctgctcattagcataattaactttttcgaaggaatatttgttatcctttcttggttggccgtatgtgcttcattccaaaatacgtgtataggaaagaagtataatgcctttgatattccttttttcaacaataatgcctttgtttgataataatgtgcgtaacttcttatatttgtcataggacttctggtctcacacaacgcagtctaagcaaagaggccgagataaaaggaaacaacttccattatgttgtgaagacacttaagtcgcaagggttaattgttggaaaacaagcaattgcaaagattaatacccaagctaaaaggaaagctgtttcacaggataaacatgtcatcagcacaaactcattatatctctcaagatatgcgaaaaacttgaatatgaactcataccaaagaattgagattacaaagcccaaacttgagtgcaatgaagaaactaacatagatgccttacaagaagatgagactcttagtgttgattacaagaacgatgtgtccattcatgattatcttccagcaatgaaagccatatgcgacaaacttgaagaagctagtggaaaggtcaaccgttctcttccttttgtttgtgcgttgcttttcatttttcactgtgctaactttgtgcaactattttctctatatgtaggttcttgctgtatcagatataaaaaaggatctcagttacaggatgcaacctgggcacagagcatggagaaatgtaggtttgcttggaatcactttgcacatatgttctctatttacttgttgctctccttatgggatgctattgagatacccttttctttaggtactgcataggcttttaggtgcacaactcgttgaaaaaatcgctgccaaccttgatgataaggtgaatttaattatttacatttatcgttttacctttcctaacatatttgcttcttgttaaggaaattcaagaaattgactttgtatcttttaaaaaagttcaggctttaaaaatctggtccttcataattttaattacacaccagcatgatccattcccttgttcagatggcgatggaaccttttcttttgtccaacaaagctgcatccacagttatgttttccactatactaatctgaaacggagtgcacaaggtgacagaactgagaccctgaatccaaataaaacggtcttatttgaaagacaataaaagctggactagagacttccctgagatataaaactatgaattgacaattaataactcatactgaagggaaaaaaactgctattcaagataaaactatgtcaacaaatctctatgattgtatcagttgcattcaataatgtgatcttttttaccactgcaacaacctatgcaatattttattttgaaactgcaatgaaaagcgataatacaatctgttaggcatgaaaggtgttaattactatgcagtaccctttgtgagctgcaaccattttatgctgttgcatacttcatgcacctacaagctgtataaatcattcccttttccagattgttcactgcttacgtcttctgaagagatttaatccagatgagtttaagccaaaaggtacaatctcaaactacaaacttggcaagaaaggcctggaaactgatcaagtcatggagcttccattagacaactgtatatatgatatgatcgatgctcaagggccaaaaggcataacccttattgaggtacctctctggacctttcagcgggggaactttggtgtaatattcttttttaattatatatgctaaatttcttcacagcaacaagagtgccttcatattccttgtttccagagtgctattcagcataatttaatgattgaaaatattcttcatctaacttcctctgagctatttgcgaacatattgaaaatattatcgaacaaaaaaagaaataatacctcccaaaaaacaaattaacatttacagaaggtctgtggctccaagctgccccactgcccaatgaaggttggaatagaccttgccaccacttttatagttcgtttttgtcgttgcaagtttggtatttttttctctaggttgtgactgagaggttggacacaattgcaacaacgactgggactgggtgtggcggtaggtcgagggttaaggctgcaacattagttgagcatagtggttgaggcatcaaatgggctgctgctgtggagcatctgtggtgtcggcaccaagaataatggcgaaggcaagagggcatggtggaactgctgccatggagcatctttgtggtgttggtcaagaataatggtgaaggcaagagggcatgatggagcatgggtagtgattgagcagaacggaggagattgtgcaggtcgtaggcaatgatagcagcttgacatgttattgtgatatgactttttcttatccgtgttgatgcttgtgcatgaatctagtgagctaaaattgtatgcgctcaaacaaatttgatagaagacttcaatatcattctgaagacctttgtggtcagcgactcagcgttgttatccctcaatatgggagtttcataagcaatataacaattcacacattttgaaactattgtttccctaatgggcccttatcatttcaagctagttgttgttgttgttatttggggttgggagagggggggtggtaaattcactctggtctaggctagggcctgtgcgtacagtttccaaataatgatcatatactctatgtcttgaaaagagccaaaattgtgatcttgctatcttcaaactatataaaacatatcgtccacatgtacacctgtccacagttgtttatgatgtaattgtttttttaccattctagaagtcgcacacatgtctacataaatccatccacacaaggtcagcatacagcgcaccagcaccagggatgacttgctgtctgtgtctcaccaggggttaaatctccaaaatagatttcaagcctagccgctatgaaccacaatggtcctggtgacatgactgtcgccgcctcagaaacttgtgatatgtatagtgtgcttccaaatgatggagtagagactcaaaagagggaaaaaacactctttatgtagtagaattgtagaaatatgacctttgatagagtctatacatctgagctatcagtaatctctctatcttatatcttatgggcaagcaaatgcaagcctatgactatccggtgcagcttatcatgagatgttagccagttttagtcctgcgctgattctgtgttgtatttggctcatttctagcatcataactttttttttgtttgagctgcatttctagcatcacaagcatttctttgtttttgtttgagctacaatggcattaactaatttatttcgtcccgaacttaaatgagatagatataaaattcttgcaatgacattatccttcttggtgtaatccctaatgaaaataggcaaaactccctgtcatgaagacaataatatatgggcacataaagttggttgagtgttgttttcttttctctagtatgaatacattttttctgttgaggaaatttctttgttcatatttgagcttttagaacctaagtatatttatttgagatccatcacagctgtatatttatttgcctttattatttttatattattgttgttgtttattgaaatcagcaactcttgttctcattaatttccaatcagcttggcaaacgtcttgggggaaagtacaacaattcgaaagagctccatgatcgagtatcatctatgcatgatagattcaatctgactgtggaggttgaagtcgttggcaaaagtaaacagggcagagtttggacttcaaaaaatttttcgctgtacaatgctactctgcgaaattgtgatgtgccagatgatcatgactattgttcagtatggcctctcattccttctgaagaaccgacttctgttagcccatatggttttgtggttaataacaaactcttgtttgaagaagattgtcatgatgaaccacccgtacatcgtctcctgaatagccatgaagcttgtgttggagtttctcaaccagttgaacaaggtacatcattctaaattcctgtcagttctttttttctctctctaaaatagtgacacgatcatgcattacaatgggcccatatgactgggaataggctgggggtgtgcatgtaggataaaacacatgatccaacttttgtttttctgttaaccaaccacttggttttctatcttgtttatctgaagaggtgttggtacaacatgaggggagggttggacggatgattcccctttttatagtaagaaattgtgcttagtgtttctttggaaactactgtgctgctgtaagagcttgtggtctctgtgcccatagatccaaaaggcccatagaaaacctagagtttcaatctttgatgcatgagcaccttattgaaatcaacagagtaggacagagtacagttttgctcaattaaggtgatcctttttttttctttcagataaagttgcctttcagaggaagaggcattgctggcccacgtcaatttctgatgatcgaagacagaaaaggattattcacatattaaaggttgcttgcttacctgtcaatcaatattcttgtatgaactatctgccaaaataccgatgtgctggaaatcgctgttcttttccctttgactttctacgagcttcatttgcagcatgaaatttagtcagaagttgcttttgtcttgagattttataggatcataggattgtctgtggcttgtttatacttctaattgcattgttagtgcatacgttaggtatgcagatatctgcaagtggtatctgtgcattaaccctccactttataggagcaccttacatacttccaattgcattctctattcatactagtacggtgcctgtgtattgctatagatctcaaataaatataccatgaaatttgatgtagcaaatccaacataattatccttgaaacatatataattaatagaatcaacttacaattacacgtacacatgttatatgaatacaatattttacaaaaaaacatcttgcaaacaacattcatttctacacaaatctatccacaaaagatctcaaccgagtggttgccatagaactgttacacaccatcagcagctcctccttttaattagttaagaggtggtgctgtttatctacaagtactttgtgcaacttgtatcccttttagaggactttagtcaaataaccttccggcccaatcatttgaaactgattttttttggataagttcttcatgcttcgttgacacccttacaagttactttatgcttcgttgacacccttacaagttactttaccgttcaaacattgttcctttttttttctcacttgctatgtctcttgaatctcatgaaattgtggtacattagcagctatgaacacatgggttcccaccaggcagtttgttctgccctctttgctttactcatctgcagcctcccttttcactgtcaccacagttggtagtagtgcaagtcaatgttgttaagtctgctagagtgctagtcgaacctagttgtatgggtacctatcagccagttaatcttgattagtcatcgattaagtccaattagttgcggtggctggttggctagtcgagcaggatagtcgttctgcttacttgcctaatccaggatgcatatagcatagttgtataagtagttgactactgctactagactgcaccaagtgcacagacacagaaaacacagtaaattggaaagcaaagcaaagcatcaggcatggccacctagttgtccagagtccagattcagactcgatagactccagagcagcaaataaaagaaattgctgaaggacatattacttactaggattccttttatctctatctcttattattaggctttgagaagcaatcaccttcggacctctcgtagattatcagcttggctttgctcatcaccagtcaccgtcttccatagaacgtttattgaatatggaccttagcctcatatcttcctttatggcaaacaactcggctggattcaagtatagggttgccccatgcagccttttgctccatttggttgtcccatctcttgccaaagtagcacagttcctctttgagtaaatttctattgtctgtcaaagaatgcttgatggatctcttcgcaatatccatggctggcatgatgtcaggagctgctggtgtctcatcaccatattctgtccccaggaaatgagaactggctgtttagctcatacaatattccactaaagtccaaaacggcatgaaaaggacaatgctctcaagtctcaatcatctcctcttcagtactagttgacaactagtcgtccatcacttagtcagatgactagttgtaattggtccctgattagtcaaacgaccaggtttctagtcgagctagttgcctcggagtgccaaatcaagatccagagaccaataacccgattcatcatgacttattggatgatttaataacattggtgcaagtagctatacctgtggtaggaccatgcattatgtgatatgagagacaattttatggctgctaatctgtcaagatgtgatgatagacacaaggaatttgcaataaaatgataagaacactgtatgtggatttactatatcatgatttgtggggatgttagttatccaaaatgtataggagagccagttacatgcttgaagtattttttttttatttaaaatctccaggttgtggcctctatctctggcatgtttgaccctacttttctgatgtggcagctaatgattagttaactgtttcatgtttttcatttatacaaaactagattaactgttttatatcattttgttcgttcaaacaaggatggataaaggagggcatactagtgtggttacaagacaataatatcctaaagagagttgtgagaagcattctctgtgcgcgcgtgcgcttcactttcatgtgcatgcatggtgtatatactcccttgcatgtctgtcttcatcttttataacaacttttagtttccgtttgcagaaacatagttttgtactgatggtggagttgcataaatggttagagagagttgaaaaggaaaatcggaaaatatttgacaggaagacattgattcacactttggataagcttcagcaagagggtacttgtaagtgtattaaagttaatgtccctgtggttacaaactacgctggcagccgttccatattgatgtaatactgaattcttctgttaaagtcatgtcaccggaactcatggatcaaattaggaacagactaagaaattttgattctcaaagtcgttcaggtgcagcagctaaactgaagcaaaagcaagatacagctgccatacatggcttgagggttcaacgcagagtcaaagttaaaaaaatatcaatatcagaagctattcatgacaacggattcataggtgcaaagatgattcgggcaatattgttacataaatttctgtgggtatatgttagtggtttgccaaacgggtccaacgactgtgtcaaagaagggtagcattatgacaagaaccttgatcaatcatgtctgttattttcaatcacagcagctataaagaaaatgcctcttgaactctttctacaagttgtgggatcagcaaaggttcataccttgataaaaaagtgttctcttggaaaaacactttcagagattcctaccgacatatacaatcagctcatggatactcatgccaagggccgactctcgcgcctaataaatattttagataaactcaaggtaatattctttgtctttggtgtttggctgtttgcaattattattttgagaattgttaaattaaatgtattgtatagctagctgtgtatttcttctgttctagagggtgttgtctgcacatttatacatttccatttgtgcaacgaaaatctcaatcattaggcgtgttcttaaaactgagattgcaggactggatttctttaggttgatattttcctgctgcatttatcttgttataccaattcctcttcatgtttaatgcaattcagtttgcatgctatcttgacttatctagcacaacaaacttaaaatgaccatttttttgggctatatatgctagttgatcggacttctaaatggatacatagaggattctaatgtgcaaccagatgatttgcctactcattcgctggagctcaggccttacatcgaagaacctactccaaggatcattctgtcatcacacgttaatggaaaccattgtccaaaatttcgacatgattttcagctttcaaagctggaatctgtcgatacttactgggaaacattaaagtacagttatgtaacagcaggcttggctgagacaagtgccttccctggctgctgcatccctgaggtttgtcatcaatgctacatattgttgcactatctttatcttttccttcttgaaagttttagttggaggtgatgctgtgtccagccacaccccctacacctgaagcaattttctggatgcacatttatagacatgtttgtgccttttgcaatatcactagttaaatgcccatgctttgctacagataaaatatatattaatatttgctacaacaaatgttttttatgatatgtgttatcaatttttcttgtaagaaatactcaccttaatttgactttatatgtgtatatatgcagaaaattgcattctgtaatgagcatatataggagattgattgatccaatgtgtccatgcatgtgatttgtttttagatttgagtttttttcttcacagtttaaacttgttcattggcaattcatgggcatgatgcttgttacctaataataatgatatcttacaattgcttatctaaatttactgaacacattctttgttatcccttcatgcacttggagaatgcttgttttctcaaatttgggctcctgtacggggtattatcatttgctaactggtagagtgatttttacaagaacctttgtatcattctctatgtacccctccatttcatacattatatcctttcttttgtttggctgttgcaaaatatactgcatattcgaacctttctactaaaacgtgcaagttccatttgaatgaggagtgcagcttgcatgcatatcatatcataattgacctcaataccaatactatttggcactgatgatggtgcatcaagaggtgcaacattgtatggcataagttaacctcccaaggccacatcggatctttttactcttaatcttcaaaacgaatacgagaaaaaaaaacactaattgaacactcgtagagaaaattcctcgaaagtgttgctgagcatcagcagcaacaacaacaaaagggtttagcaggtacgtgtgattgaaaaattacctcagtctagaatttgcctaccaagtttatcagatggtgattttccaacaaaaatttccaaaacatcaagcaaagccctcaaagtagcatagaactttctcatttcaactgctctagatcccatcctgatcaaaataaaatggccattagaaatattagtgtgcacaagatgatttttctatgcttatcataatactaatagaatgttagcacaagagcaatacaatgatgcaatatcgttttcatcaaacaaggttcctgaaagaaatagcaagtggcacaaataatccccactgcagaactagttgttaggccagcaaggcacatccactgcttttatgcacattaaagcttgtctgtgcaattgttgatgcgaaaaacacacactggcctagaagatctgcttaactcctgtgcaggtccaaaatcttgcttttaggttcatgagcgtgccagttgatttgatcctgcaatcaacaagaataaagacaagaaaaccgcggtttattccataaacgatagccgatcggctagttgccgataacatatcatttattttcgagccgatgtcatattggaatcgatcagcagcaatgaatgaataagataaaactaaatctactcgatcggctgtagatattaacaacatataatctttacttcaatacatacttaaactaaatgattgggatagatcggtcgtcatgccgagacagtataaatcacttaagtcgaaatatatattaaaataatgattatataggtgtttatagcatagccgatcagatagatctagcatgtatcggctaatactccgataccactttatactaagatatcaaaacaagcaaaatacattaaacaagaagcctaatatactttaatgtaataagtcttaataaaaagggagatttagcataacaatcaagcatataagataaaaatagctaaatcaggtaagatcggctgaaactccgacactatctctatcaatgatcatgaaacaggctagataccacaattatatatagaacttcatagatcgaactcaacagatgcagcattaagcataaagataactgtaagatctaaacaagataatgaaaacctctaagagatggttgatacatgatataatctagatcaataacgagatttaactctatcggctactttctagtaataaaaactagccaattgcaagttatatagcgcaactgataaagattataaagtatatatgataactcgacgaattacataaacaagattagagtgtcataaagatggaagcactaatcccgagaacgcaaaccgccatgacaagtttacctctagttgaagatcgaatcgatgcagctcaacccgaaagcaagaactcgtcgaaatagaacgaaagtaaaaagggtggcgatgcgccgaaagtgttactgaactgttgttgtttaattacaggggttcgggtcatatttatactccctccatccaccaaaagttacacctatttcacatttgagtttttctaaataagtttcctatttgtagtctatgcattcaatacttaaatgaagagataaattaaatgttttattagaacccaaggagtcatctaaatactcattggttgaatgcttgcattcactcattgattttgtaacatccaaggtgatttaatttttccttggtcttggtgttaaaagtaatatgtgtaacttttgtggatggaaggagtagccgagatacataatatgtcctcgcttgacacgactcttatctctaacaaactctaagatacacataagtctttacggcagacctttgcccaaaacatatctctaaggaaattacataaaatatcctaattaataggtacaattgcctatctgagagcctatctccatcgtggctatctccatcgtggcaatccttgtgtagcacgttgatcgattctagaagcaattttacaactgtcttcaacagaatcgtttgtatcggctgtcctctgtccgatccatctcagccgatgcatactccagccgatgccttcgcagccgatgcagactctgttcttcgaatccaactctttgctgaatccgctttgattccaatgctggacctggttcatatcttaccaaatttggtcgttaacagcaattaaagagagggcatattctgtactgaaagttctcgactccaggagcctctcctgctcacgttgcatatcagcaacccggtgccgactgttatactcttgatagaagttccagaggacttgcatgtcattctgttggaactaagtagagagagacatatagtccgtgatggttagaagcataccttgattacagaagctaaacctgtcttgaactgataaactccttggccatcgctgctggggtcaaggttctgttccatgttgtatgcttgctcacaaactagagagcaaggagaagagattatgagtcagtcggttcaagtgttaaccctaaaccccaaattcggcggcggagatagatgcaagagggagaggaagcaagggagggaggagatataagcctgcaagctagcactcctcattcaaatgttaataattgacctcaatgcacaatcttgactgttgctatcaactatttcactgttatcttcaatgatcgtctgctgcagttctgctgcctccaatgtggctttgcaacccaagttggctagttccatgtatcttgacactatttcatgtttgtaatgtcctttaactatatatatattgtagctgcaagcatgttattagttggtgaaaattttccggtagttaatcctgcttttttatgggttcaactgttatgcccactgtaaacaatattggctggcattggctattttgctagcttatttaggtctgtcaggccttaactgtcaaccttttattttcatctgtacataataatatgatactgtccatataggtttctcatccacgttcatggagctcagtaagagtaatgactactgaccaacatctggaattacaacagcgtctcatgaatgaaagtgagacgaagtttgccacacgattgcaaaggagttgaatctctctttgcagcaggtatgtgtttgaaatcccccattttccagttggagattcataaggattactttgtttatttagtttaccttttctattcttcttttgtgctaattcttgtagtaggccacttgacctattagatactaccttcatggatccgtccccaaatataagggatttaacatattaactaagggtatatatctagagaaaacatcaaaaacattgggaactatgaaaattcatccaaaaacatacttgtacattttaaaaaaattgggaaatctatgcctcaactatgatatacatccacgcaaaagttgattcaaagttctcatgaaaatgacaaatttaggttgcatatgcgctagatgacaaatgctttcacatataacatatgtataaataaccttttttttccgcgttgtataagggtttcatgcatatttgtgaaaatttgtatggacttagagccctcatgatgaatgcaagtgccatttataataacatttgcttacatcattcttttctaattaagaatttttacattgctaacaatcgttttactatcccaaatttccaattgcaatcttttatggctgatttgtttttagtctgtttctgagtagtatttttaattttgtactgtcactatctatggttcccctccaatatcactgactggaccggattgatttctgcttatataggtgctatgtgcttcctccaggcagcttcatggacaggcaagtatgtctggtacacagaatcagcgaaaatttagttctcgatcaacctctcagaaaaggaagcgatctgctattgagattagcatgaagtttataaagcaaaaggctgaagctagtggatcagctgaacagaggaaagaaataacagatataatctcttcaacatccactgaaaggggattcccggagcatgcgaaattgtctagacattccagttcaatccatgaaagtaaaagcatgccaattctcttcagatctcatgaaaatgtcattaaattcaatgaagctgagattactaaaagaggtgtatgcaagtccttggctatttccaatgcattggagctcctgaaggtgttttttcttagctcatcatcggggtcagaagtgcaagctacattaacagcaacgttccagctttattcagagcgcgaaattttaactgctgtttcctttttgagagagaagaatttcttggttagtacgcttaacttattcatcaatatatcaagtctcatttgtttatttcttcactcacacacgacctcagacgttttaatctgtagtagcccccttgttgggacctgcacaagtaaaacaaatatattgacaatatcatgttagatttaaaatcttgcatgtaatgtgcagctttattaactataaaggttttttccctaacttcttgccgtgagaaaactatttgtacatatagcagtttcataggattaaattggattgtggtctgttcacaaaccacccaccattagggagttaacttcatacagaacctagatgcactaaataggtttgcctttagtggatgtcgatgtttttgctctcctgctgatggttggaaatatgttgtaagccaagtataaatgtgattactccttccattccaaaacacaagcatttctaggatttgaaatttgttccacaatataagcatttctagggcactgattccaatgcacggaaatccatgcattttcaaccaatcaggtggttcgtaggggtatctaagcaattcaaaattcaaaagttgacctaaggttgacaaagggaatcttccccctcatcctttatctttgctcaacaacctataaatgctttatattttggaacggtgggaataagttacatatataaatgcttatactttgaaacggatggagcagtcacatattcctcttgttttgcaggttactggaaatggaatgaaacctgcaaccctttctggaaaattttttattgacgcttctcgttcacccttcccatttggttcaggaaaaaaggcttctgagtttttgaaatggcttatagggcagcaaaagaatactacagacagtacagtttatttgtatccagatctacaatgtggggaaattgttcacctcttttctttggtgttttcaggagagctgctcatttcaccttccttgccaagtgaaggagttggtgaaactgatgagcctagcagcttcagacctttcatcaaagattccagtgaattggatgactgtactcacaaacgcaaggctgtggagttaataagcagcaagagtaagaaacgcaaacctttgcccaagatagatactgacttctgctatcgtcgagagaaaggtttccctggtatccaagtggctttgaatcaagagaggattcaaacaagcaatctcatgcaagtgttacatcataaagaatgcctcatgtttactttagccagggaaatgggcagcaaggatgttgattctcaggtagaaaggtctgaaatgttaacagatttaaacaactcaagttcatttcgctgtttattatctgcatctcatttggagaattcttataccggatggccttgggatgctatgaaaatatatgccgagcagttaccatcattatcttgtagtattctttcttctgatctgttcagaaatgcattttgtattattcaccaaagtggtgaacaaggaattaatttgagggaaatttcgcaggcattgcatccactaggtactctttattctcatgaatataaataggtgtagtttttgtagaagttgttgcataaagctacatctttttttgctagaattcattttgtttgtttttacccctgcaggaatgcaatatatcgaattggttgttgatacccttgaaagatttcagctggccattaaggtagagaggtgaatatgtgtgaagtagattggtgtatctgtttttatgtatcattactctctattgatggatttaataaaattcacttcatatgtagtagtacttggttgtggaatctattgtttgcttttctttcttcctcttttggcttattcccacttctccacaaatttcaactgacagatctttctactggcattctctctttctatttagtaggatcaataattgcaaggttatgagatttaaaaaattgtccaaaattcgctagaagttgtagaacatcgtattttgaagattgtgaaagaggtaaaaaccacaggtatttgaactggagggagtatatgacactgattaataatgtactaacatacgacttcattctgccttcttggccgcgctttctttggttgttattcaaccacattaattaacatatacgagtctgaattttgtcaatggcttcacaggtcaatgcatatgatggtgtgcagattgttgattcattacataagccaaaatatcatataaccacacttgctgaatacagtcaatgcaactgtttgtgagctccggtttctgagacagaatcaactggggacaccagaaatataatgaaagagaagtatgctgtgcctattaatttgcaggaaactgtaaaaaagcttggtgatggacacattgtttcagttctcaatgttcaaagtaagtcaagctcacatttgcacagtcaaagtcctggagatgatgaaggcacatctacttggcactggggcagtggttgctctcatgtttgcaagagccatatttatcatccaatattaccatggctaaatagtgatggaagcattaatagcactgtctatgaatgtttaagtcatcggattattggatatgtcatgcagtatcctggaattatggaggtgtgtgtttcattttattaattagacctgcttgctttgtgatgataaatttccaaagatatatgcaatcgaattcatgagttcttggttcactcatattatatttttataaagaaagtttacttgtttttgatgtacaaaatagattagacaaaaatgggaaactcactgatagatccaaggttattatcttttcgtacaacgaaatttcctcacacttaatggtttaattgatggtttaaacatgttctgttttgtttgtgcttcgactgtgctcgtttcccatatattagtataatgtgtattctgattatcttcatttcttagtgttctagttacttaaaactctcatgtggttaattaaattcttgaattaaaggttttgatcgtttgctctgctctacctctctcaggaggacgttatcaattggttggatgtactgaatcctcaggtatgttggctggtagtttaaataataataatactctctcaatcttaatataagatttagtggtactagtttgcgtctaatctatcgtgtactactacaactcggagtagttcttatatttttgagacggcagctttcccccgctaatttgttttccttctccgttggcagacatgccggaccttgctgggaaagctgacaattgataaacacctttatgttcgggtgtttgatgaacctgtgcctactgctccgaccacgctgcagaatattttgaggcaaggccacaatagagaaccctccaagtgtggaaggcggtacttcgctaatccaatgagtacatttatgctgtagggcgatgcagatgatggcttgttctttagttattagggagtagtgtaattaatttaagattgtgtaatgtaacttgtattctttctttcacacccgaaagaccgtctaattttaaccctcgactaatgattaatcgaataacatggtttttgttataaaaaattatattgttggattcattaagtatttttactccctccgatttttgatatttgacgctgttgatttttaaatatatatttgattaattgtcttattaaaaaaattatgtaaatattatttattttgttataagttggtttatcattaaaaatattttaaacctatcttatatgtttatatatttgcataatttttttaataagaatggtcatacatgtgattaaaagtcgtgttaaatattcccctgcagtaaattggtaaaaaagaagtgttaaatattaaaaaatggagggagtattttcttatgcctgtgattttgcaactgtaagcggcattgtgcgagtgattgattatttcaatattttaggctatgtttggctactagggaacgcttcacacgggagaaaaattccacgaggggattggatcaatttcccaactggttcgttcggatcggttattcggtttggtggctggaacgcataaatcatcttgccaggcattatgcaaagaacatacaaagttctgcagaattagaaaactaaaacaaaatgacaatggctaatctttaaaacaagcaccggcattgatgactaacgaagaccattcaccatgattaacttgctcacctagccgtacaaccaagatattttcaagagaggcttataatctttttaaaaatgtgctaagcaagaacttgcaagtaagagataaatactgaaggcgctctctctctatcttcacattagttagactcaagattgaagctcccgtcgtttcgcattcggattataagccaaaatcaaaatttaaatctttaaacgtaatttataatttcttttaaagacttttcatcgtagttttttctaactttgttttttaacaataaataacacatctacaaaatttttacacaaattatttttttcattgcgaatatgcgtattctgcatattgaccatttaggccaaacgatcagggcctgaatattgaaataatcaatcacttgcacaaacatagcctaaaatattcttaacacatctaccaaaacttatattcttcagacatatcaataggccaaatgaattctcaccaatttcttgtggtggtaacagttggttcttacacttaatctggcatccagttgttcggcaggagctacgacacgacatatctactcatgacttagtcaaggttatcctcagagctagggatgctacaaaagagctggtcatcaacaccgtaacgcctaagatgtatgagtgatctggcaacaaagatgaatttgcatttcgtaatacaaacatgaaccagtcttgtaataaacatatcttttttttttgtttacttctacattccggtgtgtggcgttatggcattttaatcttgaatgaggcatttgcttaccattatgacattttggtccttggaacagtgctgtgtggcatgtttatatgatgcaatttatgagtaaccctttcatctaattagcattagtgaaatttaatataaccatagcgttagtatgggtattttactaatgaagaataaaacatcttaggtctttttaatagtctgtttggtcaagatgaagattgttgtcggtttgtctagtgtaaaataaacctaaaattgcgtattattcacggagcaatgtatgtattattaattggctggcattctctggataatactgtggcaagtttttacttacaataggagtatgtgactatgtgagttcattaatctcagctgaaattgaaataagtaggaaatgaaaaatggtgacagtgatgtctgcctattgaaattaaccatagattgaagggacatttcctgttcttaatcttccaaatcagtaggaatgtggggcaacaacccatcttaggctccattcggtagtatcccaactcctctttctcgttttccgcgcgcacgcttttcaaactgctaaacggtgcgttttttaaaaaaagtttctatacaaaagttgcttaaaaatcatattaatttattttttaaaaaaaaatagctaaaacttaattaatcacgcactaaaacgctgcttcattttgtgtgccggggagtgagggttgggtagagccttagagctgttagagctatgtaaattttgtgaaagaacagaacagaagaatttttttactttgaataaggaaagcactgcagtataaacaaagataatcttctacaataaactgacattaatgcagaacaagcagatactatagcagagtaatgtctggagatcactgtagaacaatggaaatgcagaacaataggaaaacttggcaagcaagaagaaaaggattagcagccgcgtggcttcagacgagaagcctataaaaccgcagcaatctcctcctcaacgaatcttcccacttgccctcttcttcttcccaccattcccaatcccatccaaaagtttccagaaactcatcctcctcctcctcctccccctcccatggccgacgcaaacatggcgtgggcggagctccccgaagagtgcgtcgccggcatcctccaccacctcctttgcctccctgaccactccatgttctccggtgtctgcacaaggtggcgcaccatcgccatgcggcatctgccgcctatgcaaccgtggttgttcatgccgtccaccaacgcgacctccttcttctgcgtcgcctgcgagcgcacccaccaggggccctgcctgccggacaacgcccgcggcgcgcgcttctgcggcgcccaccttgaaggttgggtcgccgccgccgagattccgcatgatgaccgctctgtcccggggaatcgtgcccccgctctgctcaacctctgcaccggcgagtgcgtcctcctcccgagatccctccgcaacaacaaccctgataccaccttcatcaaccacatccaagccgtcatcctctcctataccccatgtcaggctcacccgtactacgccgccgccatagtttccggcaagcccaacatcatgttctggcgtcccggcatgagcgattgggtgccgcagatgctcaagtgggactcggggttcaaaatgtggcagaagcagctatccaaggacccaatcgaggacgccaactacatcttcttcggcccgctcggcgggggattctatgtcctcaacaacaaggaggacctcctggtgtacgcccccaaggccaacgacaggcacggcgagctcacgatgtcatccgtgaacaagtaccagctccgcagaaatccccgacccaccatgccggagccaggggaggtgctcgcccgctacctcgtggaatcccgcgggcatctgctcatggtcgtcaggttcgtctccacggagaaggccacggtggcgttcgacgtcttcaagctggagctgaagccgccgtcctggaagaaactcaccttggacaccctcgcagaccagacgatcttcctcgggcgaggctgctccttcgccgtcgagatgaggaaatccagccagtgccctcccaacatctacttcctggatgactccgtgagtttcagcggcgcagggagctcgacctcgcaggcgcagcaggtccaggggccgttcccctgcggcgacacgggcagatgctgcgagcagggcatcgtccgctgcccgccgcgagagccgccatcagactcctcgccgtggacttggttctatctgcccccatacgtcgcctttcttgaatggtttaagacgcaagcaatcaaacaactggaacaggtgagactgcatgtgcatcgggatgggtagaattttgtgcatattgttcagcattctgttaattctgctccggtaatccttctaaatttggcaacacgtttgagtaaggattgagccatgaatccttgttaccataacatgagatgcaatgaagatttgatactgatgatgccaatattttagacttgcagttctgattttcctaacccatgaaggttgtgatctctgttactatatcttcgattgatatgatgcctgatgcctctgctgtgctgtgctgttaatcattttaacagtctgctgtgtgaaattttgatctccgcaattgtctaatgactgaatgatgcaggctgcaattctcctaattcacttcatacagttgattattaaatttgggctgctacagtcatgttggtgttttcctattttcttataggttctttcaaagttcttacgaatttcaaatgtgaacctgattggaaattgctgtgctaaaatgaaacatgattcagcagttctgatctgaacagggatatatgagaacctggttgcaaatgtctaatttggtatatgagtggctgttgctgcttggtgaagcactgagttgcctgaatttgaggacatgccaccatcaacaggaagaagttgatatcctctatggttgcaaattagaattatactggcacgttagcttgtataacccttgattgagtaacaactgaagactgctacacgttgaattatttgcttatcactttccctatcagcttttcaactatgcttaagaattacagcctgcttaagattaaatctgtgatcatttcagtattgtatgacctcagaacactcatacaaaaggtctttatgatgttttttatgactgcacaaaacaggtgttttctatgactgcacataacattgggcactccggctacatatctgaccaaattctcaatatcgataggttgcgaaaaaaaatatatcgatagggaaaagtaaaaccggttcggagaaatatttattcggtgagctacattgacagggtgtcctgacattctctggataatactgtggcaagtttatgtgagctcattaatttcagctgaaatgaaataagtataattggagtatgtggcaagtttttttgaccgttaaaaaatatcttattcttcaagttttgcactgaagaagtgggaaacgaaagcagtttagttacttgaatctacagaaaggaaatgaaaatggtggcagtgacatgtgcctattgaaattaactatagattgaaggaccattcctgttctgaatcttccaaaccagtgaaaggaatgtggggcaacagtccatcgtagagcattgtaaattttgtgaaagaacaaaacagaagaattgtttactttgaataattaaggaaagcagtcaaagcactgcagtataaacaaagataatcttctaacaaactgaaatgcaaaacaaacagatactgtagagatcagtgtggaacgatggaaatgcagaactacaggaaaactttgaaaccaagaagagaaggattaaagggcgcccgcttcaaacgagaagcctataaatatgagctgctctctttgtaaccgcagcaatccatctcctcaacgaatcttcccacttgccctcttcttcttcttcccaccattcccaatcccatccaaaagtttccagaaactcctcctcctccccctccccctcccatggccaacgcgaacatggcgtgggcggagctccccaaggaatgcctcgccggcatcctccgctacctcccttgcctccctgacaaagccatgttctccggtgtctgcagacggtggcgcagcgtcgcttcggcgcacctgacgcctatgcaaccgtggctgttcatgccgtccgccaccgcgatctccttcttctgcgtcgcctgcgagcgcacccaccaccaccagagcccccgcctgccggacgatgcccgcggcgcgcgcttctgcggcaccttcctcgagtgctgggtcgccgccgccgagatcccgtatgatgagcctctgccgtggaatcgtttccccgctctgctcaacctccgcaccggcgagcgcgtcctcctcccgagacacctccgcaccaacaaccctggttccaccgccatcaaccgcatccaaaccttcgtcctctccgattccccatcccagacttaccggtactgggtcgccgccatagtgtccggcaaacccaacctcatgttctggagcaacaacatgaacgaatgggcgccgccgatgctgaagtgggactcggggttcaagatttggcagaagatgctacccaaggacccgatcgaggacgtgaaatacttctatggcggcccgctcggaggggggttctatgttctcaacaataaggaggacctgctggtgtacacgcccaaggccgacgacgaacacggcgagctcacgatgtcgtccgtgaagaagttcgaggtccggaggaatccccgatcgaccatgccggggccaggggaggtgctcggccgctacctcgtggaatcccaaggggatctggccatggtcgtcaggttcgtctccacggagaaggccacggtggcgtttgacgtcttcaagctggagctggagccgctgtcctggaagaaaatcaccttggacgccttcacagatcggaggatcttcctcgtgcgaggcttctccatggtcgtcgagatgaggaacccctgccttcccagcatctacttcctggatgactccgcgaggattgacggagcgggggcctcgacctcgcaggcgcagcaggtccaggggccgttcccctgcggcgacaccggcagatgctgcgagcagggaatcgtccgctgcctaccgcgagagccgccatcggactcctcgccgtggacttggttctacctgccccaaaacgatggccttcgtgaatggtatgagatgcacgtattcaaacaacaggaatagcagagactgcatgtgcatcaggatgggtagaattttgtgcagattggttcagcattctgttaattcagctctggtaatccttctcaatttggcgcaatacgtttgagtaccatgaatccttgttgctattttttccattgctatgatgcctgatgcctctggtgggcttctaatcgttttaacattctactttttttgcggggaagttttaacattctactgtgagaaagtttcatctctgcatttgcctaatgactgaatgatgcaggctacaattctcctaattcacctcatgcagttgattaataaatttgggctgctacggtcatgttggtgttttcctcttttcttataggttctttcaaatgttcttacgaatttcaaatgtgaacctgattggtataattgcagatttgcagtgctaaaatgaaacatagttcagcagttatggtgtgcttaacagggatggatgtggtttcttactttttttaacagtttgtcagatacaagagatggtcatttttaattcagatggttgtaattgatatttggcatgtctgtgtacatgtgcactatcaggaatggcatttttgagtacttcattgaagttttgagatttcaattcataatgtgaatcataagtctaacttgggacatgaatggctctggccctctgctgtgatgctaatcattttaacattctacaaagagaaatcctgatctctgcatttgtttaatgactgaatgatgcaacggacaggttttcctacttctgacagctgatgttgtagtgaatatacttgtgacagttgagtcgttgattaataacttatgattgctacattcctactgattcttttccagtattatctcagagattctttcaaatgttattacgaatttgaaatgtggagctagttgacatttggagtgctaaaaggaaacatacttttgaagttcaggttgtgctgaaagtaagatggccatggcatacctgcagtctttgcatttgttttgaaccttttgtcaaggacaagtgatgttccttttgaattaaaactaggatggaactgaaatttggcatgtcagtgtacatctgaaattctgcaggaattgcattttgtgcacttggacctgaaatttcatttggagctttctattcacaatgtctcttaagtgtctggttttaattgtctaatttaagacatgaatggcagtgtgatgaaaatttgagattgtctgaaatcgacgacgtgctcacagtaagaagttggtatagtttttaagttgttattaagtttttttagatgggacttgatttcgggtacccatgaaggttgtgcacttgtgctccgtaccgaggaatcaagcatcagcctgtggttgtgacctttatctgttcctgtttcttgcctgcatgtctgatgcctctgttctgtgatgattcacttctggcagctgattaataacttatgattttcatgttcctgttgattattcccctccttcctcagatattatttcaatttttttttctgaatttcaaatggaaagcaagctggtattagcagtgctaaaacgaaacataatccagaagcttaggctgccgaggcgaagccacccattccgtgctccccttagctggatccggcgatgaggcaggtgggtggtggggcggaggaggcatgagccggcgcgcagggggtggtgcattgtagaaggcgctagcgacgagatgttgcgatggtcctaccaggggcaggattggaagtcggttgacgaagcggcatcggttcgatgtggtggagttggatagtggtaactaagatggtgggtgacagagcacagcgagagagttgagggggtccaggcgtaaatctagcccagtgtttcattgggccagtagtggcaacgcctgcggagcaccgtaacctccttggggcactgtagaggtacttccctcccgcctctcttgacgggaatctctagatgaaaaccatgtctaggttcctggaccggcgatggcggcgtatttgatatcgtaaccttcgtggaggcgtcttttttggagattctatcatgtggtgtggttgttggcttagcaacgattggccacgcatagcggcggtaggttcggtgctaggctccccctctcaagggcttgtgtttgtgttgttggtgcatggttcctaggcgtgcgctctggtgcacggccaaccttgacagcctctatcattgtaaaaattttcacaacatttttttcctcaatcttagtaccattcgatggcctcttcttaggccattctggcaaagaagttcaggttgtgctggatatcaggtggtacttgatgaattggatattctcctttagccatggaatatccgttgtttttttttgttatatttgtttcgaagagtttgtccaatacatgtgatcatccttttgaattcagatgtttggaactgaatatttgccatttcagtgtagttgtgatgtaatcatgaatggcatttgtagcacttctttaatgtttggagttccatttgacaaattacaatgtgagccataatttgtgtctggttgcaaatgactgcttttagaaatgaatgaccttttattaatactgcagaattaggatggtagattatctggcatctgctgctctagcatttattgggtgttggaaagttggatgtattgatcatatgtagagtcttttgattacttgtctgcacctatttacatttcgtgtgttcttgttcagaatgtcctggactatctttcttcaagaaactgaagaaaattaattgctcagttgtaagaatgcattgtactagtgttacaataagagcgtctgattcctgaatcttattgaaacactggacatttgggatattttttgactgaatatctacagggaaaagtacaattcaccctgagaaaaaatatcagatgagctacggtcattgggtgctttgcaatgccacataactattctctagatatcactgtgataagtctcacggtacataatatgagttcatttcagctgaaatgaggataatatgcaatgtcaattagcatgttctgtgtggcatttccttcaatatttaagctgaagaagagggaatgcaggctgtttacttaggccatttttagttcccaaaataaaaattttcacgctgtcacatcaaatgtttaaatgtaagaaaaaaaaaccaattacacagacacgtgtaaattgcgagacggatcttttaagcctaattgcgtcatgattcgataatatggtgctacagtaaatatttgctaatgacggattaattaggcttaataaattcatctcgcaattttctgccggaatctataatttgttttgttattagacaatgtttaatacttcaaatgtgtgtccatatatccgatgtgacaccctaaaacaattttttttgccaactagggccttacttgggtcacatagaggaaataaaaatgaccaggtggcattctgactattgaattaactgtagaatgatgggacactcgtgttctgaacctttcaagaaataccaaatattggtgatagaatattaagcagcactctattgttgaactaaataaatgttctaaaagattagtctactataacagggctggaggtaacctttcccttgttgcatggtgtccattagagcaagtttaataatatagccaactaccggctccaaatcatctatagctaatctaatagtccattcatacaatagttaactacaaaaatatactacaacattaataccggtcctacctctcatacacacataatgtcctggagtccatgttacagctggctataaatctgtagcccgttttcttctctctctcatcttttcttctcgatatatgattatagctagcttatagcctactattatacctgctcttacccgatgatacgaggagcgggaagaagctagagcacaaagatgacataggatctgaaatcgatgacctgcttaccaatcatgaatgcgacgcaattcagttgtggcgcatgcaaagctctccattttctcatctatccggtgtgaaatggaggtagtattagtgttcttttgttatagtatttcttatctgctcgccgtgattagaattacagggctgcacagtgaaacaagactcttccaaaccaaacattgaaatggaatcagataacattccccactgaaagtctaaaaccaaactcctttttcattgttacaattgcctcatcgaccaagtaccgtcaaggaagccttctaggccgtgaaggtgttatcgcttagtggtactcaccataaccaaacattgtaatggaaatggaatcagcattttctgacgagttatcttttagtggtactcaccataacaaactttaaatcaaaacgattcaggaacccgatgaacacatcgcaaagtttgcttctcaggaatgcaatattatcacatttgcaagcatcctactcagaacatgtctgcaaaactactactcgtagcaaagtcaacatataatcaattacagattcttggaaaatgaggccagaaaagaacactgaatataaacaccagcagatctgctgtagctaagtgataaacattgccgctgatatgaagacctaattccatattctcaacacacagaagcaccaaactgttctagctctcgattttcacatgcacagtgtaattctcatcagatatcaaattcatcgtacatgccaccatctgagcccccatcatcataatcatccatatcatcaaagtcagcatcatcatcatcagtgaccacatccagcagatcatcatacatatcaagctctaaatcagaaccagaaaaggcactgctgctgaaaatgtaagcccggtacttgaaatcagagatcgagtcatgaggaagcttaagatcacttattctagaacactttgatttcagagcatcatccatttgaatgctgtagcactggcgtatgtccagggattcaaggtgctggcagtggtcaaggattgacatcagcccatcattagttagcttgttgccaatcagctgaagctctctgagcttgggcatattgcttgcaatccctaatgcttcagtgtcatcatccatgatatcaggggctgcataatccatttgtaaagtataacgttcgttcagcctgaagcatttgagctctgggcaagctttgccaacggatgcacacacatcaccatacaaagaacagaatgtaatatccagctcctcaagccgaggaaagcccttcattgcctctgccatcccttcattactgacattaaggcacatgctgagttgaaggctcttcaatgaggaggctctacatggaaagatagatatattcatgtaagtggacaaaataagaaaggtaacttatagaacattcatggtagaaataagtaaaatggtccattaagtaaagtactgggtgcagaaacattgataataatcagagcagtatacacaacctgctggatgcctaactagcttcaacacacagttataaaaattaacatcacctgcggatgtcattatatcacaatgtcaaaccatagaaagttaggaacaatacatagaagaatgaacgaactatccatatcatagagacaacataatctcagctactaactaacaattctatgtctctagagctagtagtctagatgaccagatgaaacaaaataatccatgcatactaagctggatgataaactgtgtattggttgctgtgctgtcaaaaggccaatttcttcagtgataacaaacctacactatgctatgttaatattggtcatgacttaaaccaaggcataaccaaaatagtgggaatacaagttcatttggattgcaaccatactgtttgcccttttatttagtaaaatcgctagggtgggagctggatcaatgaaatatattggcagtttaataaccatgctagtgcttttctgattgtttgtccttcattgattgtatttattttgaaaactaatcaaataatcacaccatgcagtaaagaacaaaggatattgtaaaagtgtgagaagtgattcgatttatccaaaattttggcgaagattccactacacacatctcagccaatatttacaggaaggacaagggcaagacctatcggtgggcatgctaaaatttggtatgcatccaagcagtagccaaaaacatggggggtatcaccaacactttggcaggcctggcttaggcatttcgtaaagttcaacaatttacatcaggctcttgttacaaacaatcctaacatgataaaaaaaatgagcaacctcactctaatgttcttccttaaatgcatacggttgttttggaaatgtccttacaaattctaaagtgaatcgataacaggatgtgtgttttggaggttaccaagttatatacgctctacatattactgtggaacaagagagatatgatctggagttcttgtctgtcagaccacctgcctttaggtgaagaacataaacaggaaaaggcaaataagtgttacttaattaaaccacaactaacaaagtttacaagggtcttgcacaataggtagtacataaggagagagccagcatctagcatgtgattttctatcaatgaatggattgaactttccaggacatgctatggtacctccgttcaaaaacagatgtcatttaaccatataggcagtgaaacctttaacataatattaaatttgtcatccaaagtacaccaaaatcattatatttgtaaaactagcattaacgcatatataaccataaaaagtagtaccaaagctgtgtattgcatactgtgctgtcaagagactttcttcaattataacaaatctctacaatgccaccccgcatacgtgtcgatgctatgttatagggatgtctaactgtataagggaacatgtttggtacaaatgaaagtgcatcatgtcagtatgatttaggaattcataaggagttgaatgcagttgcctataagtttgtccaaagttaggaactaaacaatatcttgctctatggaggcaagatagatgcaggagtaggactacagacataagcaattttctggtacaaaaactggattatcactaaaataacattaagctctgattgatttatttcatatgtgaaaaaaaaaatttagatgacctgcagtactactggatcagttcagacttcagactcccaagcctcagcatgtttatttgatccttcttctatatgaataactaccagccatttctagagtttttgggaaggttagtacaacttgctcatttccatcaggaattacttagaacaaacaaattaaaggcgacatgaacaaaagttcacattcaaatagagaaacattattgaaaattccaaacaaacacagataatttaaagaacagtggttccatggttgaaattaataagagaagggttaactttagtaaatgtaaataacaggttaactttctcctaccaatccaacttactgagatcttaattttcacaaacagagccgttaaataaaacattgtacagagttcatccagattggctaagatcgcacaaaacagtacaacacagcatgagaggtaaactaatgcgtccaatgcgtcctattcaacatgcaagaagcagaaatgcaataggaagggggaaatgctgctgccacctctcggagatgtagaggaggaggccatcggtgacgaaggagtcggcccagaaagcttccatggtgccggcggctcggtccaccgcggcgcgcgccatggccaccgcctcgtcgacctccatgatgtctccctggtggctcatatccacgcggcgccacagcgtggggtcgatcgccgcgagccggcgccacgcgcggcacaccaccccggccccgaccaggaggtcggtcacgtccagcttcccgaacaccgccgcgagcgcgtccgacggcatctccgcccagtcgcggctctcgacctcgccctccgccatttccgtcggcggcggcggcggcggcgatgacatgggggctagggtttgtgagattgggggggagggggagagacggtgggggttaggtggtggaagaaatcattcgttcactctcgtcagacccgcacacggtcacactcacacctatctcgcgcggtgacattctggcaatgatcaacagtttcgggaaaaaaaaacatcacaggtcacgtgcagaaatcccgtttggtagtcacccaaatattgccacttatttcaggtttctaaaataaaaacaatctttattattataaaagtaggtataataataaatgatatctatgatagagataaccggacgagctgcactcttggctcaaggacgaggggccgcccctagtcatcaccattgtgttccacaggccatcgcccttgtttgccgcgtcgccgtcatccttgttctcgtccgcttcaactgctcttgtcacctccatacactaccatcgttgcacttgtccatcatgtcctgccgcccccgtcatcatacaccgtgacgcaaccgtcggcgacatcaccgtcttttgaactagcacccaccgaaggcaaagaagacaaggaagaacgaaagagaagaggtgggaggaagaaagagaaagaatgagagaagatagtggatcccatgaaaatagtaaaaataatatttgtgatacagaacctctattgaatagacttgctatagtgcttactatagatgacgtagcaagccagtgcagctatcagttggctctcttatcgaccttgctctaaaaagaccgtaataatgatggtgattctcccttcaaacactgacatccttctcaggatcttagatccagcaactgagattcatcccatgatccaccccatctctcttgagtgccccatgtctcaccaccgtgaaaagacatgcgtaaatccttgtgttcctcttctgctcccacaaaacagcagagtgctaccagctgctctcccttcccaacctgtcgtcgagatctcccctacattggctctccctccaccgcaccctaccatcggcttctccctgccatcggcccctcaacccgccaacagcttcgctcgtgccccctacccaatcaaaccctaaccatcgcccccaccacgtgccgtgttgcctcgcggaacctctcctaccaaatcaccatcaatccatgtgcctgtctcatcaccgacttgtgcttggaatcttggctttgtcatgtctactatatcgacggtgagaccatggaactcatggcctctatcacacctgtgactagacctagcaacccgtcgagaacagggagatggactgtgttgtcctccgcccagggttcagccttgtcgagaaggtagtcgcaaccgcagcgagagggagagcaccatcgagttagttagggaccttctcaggagaggtggtgatggcaaacgtggagtgctcatcaagcaccccgcatggccatggaggatgatggtaattggttctcgtttcccttgcagtactccgtatttgatgtgattttttttacccatttatatggtcatatatcaatttgtgagtttgatagatttagtgcaatctgcacatgttttttctccttctccttctctcatatcttctctagatccgggtgcaacaccatttgtgacagagcaacgacgaagcggtcgagcttatggagctaggcggagtgtataaaggcatcaggctagaagcaagcctgggagaccacgccctctatattgatcttagcaccaagcagagccaaatttgtggcaacacccttaggctgactaaacaagttggcaaacatgtcttcgccctaggtgatgaactagagagatggatctctgagcaaaaaaacatgaatgaggataggtaattcagatccattgtgttacggcttcaatccaataatattggaccatcttaggttataaaaactattggatcatcaaaatgaatttacatttggacatttcagtgaattatgttgtttctctaatcgaaaatttctaacagatgtttgctgtctggcaggggctattcactaccatgttgtttccatgtccctccgaatgcctctttgatggcttgctatggtcactctgcctctatggttccgtcatcgccctctgtttacacatgtatcaccatgtagaggtcaacaaaacgcacatgtggaagatgcagaggtcaggtatattgctcagtatctcaggatgcaggaggaatgacaggacaatatgttgctgctttattcctttttgtttccactcatcttctaaaaatttcggtgtgtaagacatcagttatggtatgtttaacccaatataaaggattagatatggtcttgtattctacaagaattaatatgtggcctctgaatgtggtgtccagatatcattttacaaaatctagtaggtatgttttctatttagatgttgcctaggtctgaataaaagtgatacgcgcacggtgaagatcatattgtagcggctgccgaagcaacaagtgctcgagtggacggtttcagaggggatagcgacaatgctcacaatcaccctatggccgaaagcagggctcttcctggccagtgagaggctcttaataacgtgcgaataacttgactggattaatcttgcttgccgaagaatacaatcgagtgccccctttataactcaaagggggattaactacttctctagataaatgactccctagatttaatggataatccttcctaacaacttaacaaactaaaaccatcgacctaggagtaaaacctatgcacacttaatttgtgagcaacaatacttgctaccaccatagctgacgcaataggagtacgtgtcggccatggcatcccagaagaacatcgtgaaactttgcaagcgatgagactatgagagagaggatgaccaagctgtagaggctgaccagttcatcgtcgtcatcggggtagagcatgaagatccactggttctctcgaggcctacgaggatgggcagctgagaaagtcttttctaaacctaggtgcaggcacacctaggtttagaaaagtttagatcactccaagattcatgcctacaagtaattagcccaaaagtatatcaacgaatatcgaatgtattgtctatttctagacgatcacctagaatacaatgagacctacctgtagccatatgtattgtccacctcaagctccctctttttcacttttccacctgtagcgacccctctctttttcactttccccttctgcctttacccaattcgcccccattttggcacagcgcatccgctctatggtccacggagacgacagagtaagaggtggtgacgtgttgtagtcccgcaatggagatgctcaagtatatgacactttgacatggaatattgagttatttcctttaattccagcatgcataataatgcttggtggctttgcattttaattcttcatgtcttatgtcttctgtactggtatgacgactgcatctcattgttgcggcccaacaacgccgtcaagctggcgcagatcgacgtggatctgacatccagcatggtggcatggttcggcgacatgagaatcataaagcggaccatctccggggagctatcacttttaacgctgttcctaaacaatgttaagttagtggttgccgatggcttgagtttgttgttgggaataattaactatttgccactcttacgaatggtgctaaattatttgccactggacccacatgtcatagacatatgagggcccacatgtcatagacaacgagtggcaaataattaattgccacatcttaaaagtggcaaggagttaaatgtcccgttgttgccaacatccctaacttagttccttatatttttcttcccaagtactattgacatgtgggtcagccgtcatcgtaaataatgtataatatagttggctttaagtgaacaaggcggttcaaagtaacacttggttaattaagcgagagagaagggaaatcttaggccgtacattttagatctttaaaaacttattttacaaacaaactaaaaaaatttattccaacaatagatcatttttatagcaccaacatcattggcgtcgtggtccaacatgacaacgccaatgacattggcgcaatcccccggcttccccatggatgctaagtcacttatatggagggggactttgccaatatcgttggacattagtaccgatgacctatttgttaatacttttattacaaataggttcttttatcagtgtcactgacacttacatcgatgacctatttataaatatattttttatcacaaataagtattttttttttacaaataggtcatcagcgctaatgatattggcgtggcttaggctctctttgggacaattctggatccaagatttcttagagctgggtatttctagctccacaaaagatctacaattatgttgataatatttagataaattattttgcgcacatttcagatgaagtttaaaattttaaaccattgtaatttaatatataaacttcaaatctatcgtggatatgagatccgaagccgtgccaaacaagatcttggctttcatgggaggctaggggatgccatgggatccatttttgaaataagttttatcacgaagatgtgcaaaataagatctacccaaggaataattaattatttgctaatcttatgagtggtgataaaagattttaccactggacccacatatcataaacacatgaggccccacatatcatagatagtgagtagcaaataattaattgctacatcttaaaaaggtaaaaggttaaatatcccaggaggctaggggatccatttttaaaataagttttattgaggtatatttgaaaaatatgtttcaaatgataaaaattgaaaaacacataaatctggagtactggagtatttcccccgtcccctctgcgtcattgaaaatctcccgtcccgttccgctccagcgcctgcgccgatctccatctcgcgactcgcgagcagagcagggttggtaggggcgcccatctccatccggcgagcagagcagagcggaggaggtgcgccatcgtcccgctgcatcctggtgagcatccacatcctctttctgatccatcgctctccccaaccggaagtacttttgtctcgaatttgcttgtgttaaccttaatacaagtaacagtctgtttgttcaacccaaatgttggatcagcccccgacacgcatcctctctcaaccctctctgcccataccattttctctttgccttcaccttgtcttctcccctggatctggcagtttttctcttaattcgccttaaccttctctagatccgaccctgactagcagcagcagtttgtttccaagaaattaaaaaaaatattttgctggttgcagttttgagcctggatcttgccaaacaagtggttgatcttactgctttcggtggccgtgtctcctccacaggaaggaaggcaccggggatctagaggaggccatgggagaattctccaaggtaagtggattatcatttgttaatatgtagttgcttggtaaccggtttttgcaaaatgtactgggtgttaattactagcggtggagatctggtcatcatgaatgagtgaaactattattactgcggcaatgccaaacatgccagagtatggttgtaatgttttgtgtgaagatcaaccttaatattgaatggcaatgttaaatctctcttgtatggagctaaggagcttgagtacatgttagaatgctcgttaatcctgtattacatatttacatgtcgaaactaaaatgtggtaatcgaagctttttgttaagaaacactattatatgagaaatggaacccagtaggattgctattagatatgatatattcaatccatttgcttgggtgttcaagtggcccttatcgatccagtttattgttttttttaaaaaaaaaatacatatcatttatttttatttttgtactctttactgaatcagcattcttatttgattcattctatcaatgtttaactttgtttttccatgcaatgatgcttttgttgatgaacatgaaatgcagcattaagtaactttttctgtcctttgcacaagctcatgtaatgattcatgattgtccattttcgttacacaggaatcttgcccttctgtgaagaacattttgcttctggattctgaagggaaacgtgttgccgtgaaatacttctcggatgattggtctagtaatgcgtcaaagttggcctttgaaaagtctgtctttactaaaactctgaagacaaatgcacgctcagaaggtatttcattcttagctttgttgcatgtgttatccctccataccatggcacatgcttttgccactttgacaatttggcacatcacacattctgcttcatgaatatagcctaatatgtcgtactgtcattatatagagtggattcatatttgacacctttaactgaaatttcacacacatctagatccagtcttaagttgagcccatcaatcattatactgcttatattactctgtaagacgcttgcatctccttggatgttcattagaactggatgtgctttaagtctcactccaaaacattttagtaggaaactcaaattgttttatccgttgaatgtaatggatcggtcaggttaaccaaatgtagtacaagatacatgtcagttttctgtctttcgacataaacaggagggaagatcccttccctactgaaaatatattaataaaaggatgtatgtacaagggagaagaaagaatatacaaagagcaaaatatagactactcagccatgcttgttaaaaaaaaaacacacctagcatttactcccaaggataactaaagcaaaataccttggattccctttccaagctttcaaggaaagatatccttcatataaaatgatactgtttcaatggtttgaaatcatccagcagtctgttatgattatgttagtttgctgttgctagcaactcatttttatgaacaaaaatcttcatatttatgctcaatgttataattatgtctcgatatatccacttttctgatctttattctttagttgaatttggaattttcctttgatacctgtttttggttctctccagctgagataacattgtttgatggctatattgtcgtttataagtttgtacaagaccttcatttttttgtcaccgctggtgatgatgagaatgagctcattatagcaaatgtactacagggcttctctgattctgttggtcttttactcaggtattgtacttcttccagtattccacatgaacttgtattttgttaatgttggtaaggctgtttctttaaagtcagcttactgtgctttaggggtgatgttgagaagaggactgcactcgagaatctggacttgatacttctctgcatcgatgaaattgtagatggcgggtaatggtttcttgtgatctatgctacatttgtaccacctgtttcttctaaaaaatcacatgcaagcattcctgactattatacttttttttttcgtacacacgctgttgcatgttttttaattaagtagtatctgatattccattttatttatttgtttgaactttttttaaacatgtaaatatactgtcataaaatatgttatgctcataaaggcaaacatcaatatctgttgtgtaatatcaatttttttaagatggaaaagaaggaagaaactgttcattgtgttcttttgatgcataaaaacagcacaacagattgtctgtagagacttagtttgacatgccattagtaagcctaaattgcacatgaatgtactatggttgtagctattaggtcagaataaccgatggaactgtaactcttgacaaatgtgggcagatacaagagaagcataatattttagataggtgttgtcatttgatgtcaagttgacaaccttttgcataatgacaaacgctgatgtctgaagctattgggaagtttctgcccgaaaaaccattttatgcttaactagttcatggtgataactttaaatgttctgtgagcatcgttgcagtataatccttttgtcttccaagaacatacttctagactaaggagagataaaaaaatattgcattatattcaataaatgcatataagaaagttggatatttaataggagtagtaaatgattagcactgccacatagattttttgctgatgtggaggagagagattaagatcatctatttactaaacaaacgacttggggcaaaagatatgatatcagagcgagagcttgtattgcttcgaggaaactagtgccaaaaacatgtaaaattttgagcactgagtactacctccatccacgaatgagaggacgccgtagtatttattttgtacctattgcttatagacagaactctttgtatgagtagtctctcatctctcataaattgtcttctgatgtggaggacagtagaaacaactactttctcatccttgtactgctgtacattccctgaagttctttcacaacttactcttgtggacaaaaccgtttaaaagcatacatggggtgttgggaaaaagcatgatcgctgccaatttcatgtattaaggccgcagctctcttgtgaagctgtagtttcacatgccatcctgtttgtaaatataaactgaaaccattagtcctcctgcagcataattctggaaacagatgcaaataccattgccgggaaggttgcaaccaatgctgttgatggttctgcccccttctctgagcaggtatttctttatcattcggagaaaatttgcttttctagttccataatctcattaattttcatggcctattctctgcagacgatatctcaggctttagccactgctagggagcaccttgcaagatctctgctcaagtaaatcatttatcttttgactccttaaaacttctctgcgttgaggattgggcgagtgtacgttgaagcatgtaattgttaccttttactcataataaagtgtaattgtgacggaaaaaatagttgaatatgatataatacttgtactcagatttatctcatcaagtgctaatgatagtttccatgattgcttctgcgttgcaatttctccccaagtgttatactccctccctccgtcctagtactagatgtaacacatcttactattacgaatctagatatacctttgtccagattcattatactagaatgtgtcacatcctgtcttagattcgttttttttcgggacggagggagtagaaaatgaagagtagaatggtttgtattccctccgttctatatttatattgtctggtgttttagttctgtcgtatgtcaaatttctgactttaacaaagttcacagaaaaataggctaacatttgtgttccttaaaattcactaacagagagtatttaggataccatttcctttttcaacttattttttgaactcgttttgagtttccaccaaaattttcagtgcggaaagtacctatattgaaagggttccaatgttgaagatctctacaaaggaagtttaattgtacaaagtttcaagggttccaatgttgaagatctctacaaaggaagtttaattgtacaaagttttcacaacgaaaatctgacatacgatgtaattcattcatcgcaagtccacaagtgcgcaaaacgccggaaggtttgcaacttgcaattaagcttgtcgctggacgccggataataaaggaaagaaagcaagcgatgagcccgacgcaccacgcacgtgggctggaaaccagttcgcgggagcctttccgctgacataaacatatttcaccatcacaatcgtacacaaaccaagaaacttccacaagcgctatggcaacacgcagaataggaacaaaggttttaccactacacatgaggtcactagaccggttgcagacttgcagttggatacagaaccgttctaaatgcgcccttctgttgtagtaagctactacaacagaaataacttacagcgctcagcgaattaccttacttctgaacacctaccttccatttcctgagactcagacgctgggacatcaaaacctgctaattacggcatgtagatgtcgagttactcatggtggatgatccgaccgcggacatggtagtcaccgatgataaaaccatactctgtcaccctgtgaccgcccaagtcatcatcgtcctgatcaccatcatcgtcatcgtcctgatcaccatcattgtcgtcatcctcgtcattcccatggaagggccattgaggaactgctgcgggaaatggaagtgggagcgaatctagtgatggtgtctcaataaaagtctcatactcatagtccttggttgagtcgtttgggaacctcacatccttcagccttgcacactttgctctcacttctgcatccacatcgacgttgaagcactgacgcaagtcaagggactcaaggtgcgggcagttgtcaaggatggcagcaagtgcattgttgcggagccgattggcaaagatctgaagatggcgtagcctgtgcatgctgcaggctattccaagggcatggaagttatctctgaactcatcaaactgaacatcaaaccaacgatggttcagtcgcagacacttcaggttcggaaatgcttcgccaacagccttcagcaaaatactgatggtgcaggtagtgagctcaagttcctcaagacagggagatgtcttgccaacagcaaccaagcctttctctgagatttttatgcaatcacgtagccgaagacttttcaagcagctagttctgcacatattaaaacataagttagagaaatcgacattaatcaacaacctgacagtaagaacaataggctagttccctaacaaaaaaataaaggcacaacttgtaagtagagactgtcaatatttgtggttgtgaaataaaatcacagaacaaagtgatcctatgtcaaatatagaagcattcagtaatgctaaattgctaacagaactcatgaactcaagcatgttcattagttcaatataatgctcgagttccctctatcctaaatccatgtatgatcatgaaacgattggcatctatctatgagcaacgcaattggcaggttagatccaataaataatagtaaatcagtgttgaaaattgtaaacaacatctgaaaccaagtattaagtttttttttggaagaaaaacagcaagcaaggctcctagagaatatttagaaacataagggctgggttggagaaaaacaatctagttgattctacagattcccaatgcacactttgatcagtacactaagctggtcgttaagtctgaatatatgcagactaacctctcttctttgacaccaaaaaagcctagttacacaaaactcatgttaaagacctgcttacatatacgatatcacctctaacccccataaggttaaagtacatacattttatctgaaggattgcacacacctatgctgaatagtttagattcttcctttggccttacactctatgacagcctagctgagtcttactagaagaaataaattccacttatgttttccactgaaacaatatagtcaaatttgcataaaagtctttatctgaaagagaattcctcctatcccattgaattagcttcccttatatggcactacaaaaattgtgcccatcctatgctaaacatttccaacgttgttcccttatttgccactcaagtcaacaccattagctctaggtaccattagaagacatcccgtgtcatgcccaaccttttcacattggaatcatcatgtcgccagaagatgaggatgcaaggacagccacagctaactccaaatactgcttcgtccgcattgtccagctctgatggacttgaagtcggtcatcaaggtaccagtgctggcacagaagcagcaggattgtcagcttccctgccagggttggccttaactgacttgacaggctgcgaacgaacagaaatagtctactgtgcattgaacagaaagaggaagagaggagaaaggagtggagaaaggagaagagaaaagatgtcttgccatctgacctaggttaaaaccaagatataggcaagaaaggaaagataaaaatgaactaattgagaaacggaagaattacaaactttttatggcaaacaagggaactagatagcattcaatggcctaggaggaatttcgccatcaattctcatcttatgcatatgccatgcagggattccaatttctgttcgaaatttcctaaattttggtaatttcacttccctccggcaagcaaatatctcacccaaattgtttttctttttccaaatttttgtgaatttggtcaaaatttcttcaagttcagtcattttgttaaatcttcaaataatttcgggaaaagaagttccaaatcatccgaaaattttggttgcactgaaattccggttcaaaccgaaagtgaaaaccttgatgccatggcaccttggaagaaaggaagttcataaaaaaatgatttaaaaataaacaaatgaaatataaaaacaactgatgatatcaagcaggaccctacaaattggggtccattggaaatgattacagacaacataatatcaggtcatataaaaagctagcatagttaaataatattttctgttcagtggggtaaattataaattatagatatcaggatcaatctcaagtttcatcacccataatatttgccagagatgttagctcaaagttagggttagccatggaattatactagagatctcaagagagaattttcgtagcaagtatcatatacaccatgggattattagtggtcacttttgtgagacaggagtgtgcattccggaaattttctggctctataccaataaaagactccacagctccatatctgtaatctttacaagacaactaccaaatctaagtcatgtcatatcaatataatcatctaagaaactggtatttgcttttcaattatactttactttgtttgactgagtacaatatagagatctgaggcatataatgcaatagttcaggcattctaaaaaaagttagccagaagtattgataataaggtgacaaaaaatgttcattaaggaaatgaaacccaaaaagaaaagaagaaataaccaaacaatcaagctatcgaaaggttaaaagaattagcatcgagacatctaatgatttgcataaaggcataaaacttcttttattattactattaattgatcatataacaatgtttgattattcttttgtgcctggaataaatttgatagcaatatgatggcctcggttcagtccagaactagtgaaacagaaacctaactggtatatgtagtatcaatggagaagacgacaatgcagttgtcgagcatgaatgcaacacaagatccaaatttaataaaatggactggtgacgccgaaaacaaaaacaaatcaacccagcatcaatacctggggagacagaaccgtgcttcaaaaaagtctgcaaggtgttatgtatgctcaaatccctgctaacccttaacatggccaacccataaggcatcaacaacatgtgtacttagagccactaatccactacagtatattttcttatgctttgtttgtgtcgttgtggcacattgcagcgttttgctgcaactttataatgatgcagtatgcataaaaactccaatctatatatactccttgctctacttaaatcatcataccgtaaaatcatacaaaaccccgctaatctctaataagaaaaacacaatcagagcgaccaaataacactgtagattaaaccctaaatctcccgaattttcacaacccaatatcgtccagattccaaaccccaggctttatagaaacaaaaagaaaaagaaggggtaaaaaatgaaagaccataacctcttggcgacgtagaggaggagctcatcggtgacgaagcgctcggcggcgaagtgctcgaggcgtccgccggcgcggtcgacggccgcgcgcgccatggcctccatgtcgacggtggggtcgaagcaggcggtgaggtccacccggcgccagagccgcggctcgcgggtggccgcgcggagccagctgcggcacaccaccccggcgcccatcagcacttccgccgcgcccagccgctcgaacaccgccaggaccgcgtccaccgggaggtcggcccactccggcggaggaggcggcggcggcggcatcgatcggggaaggagggtttcgggagggttattctcgcgtaaaggcggggacgccgagagagagagagagagagagcgaagccgtttaggcgcggaggcggagggtgctacgcgtccctctcacggagagatcggtgcggccgcttcacttgtggctttgtgggttgtggcagaacgcgttgaacgttgttgggacacgagctgaccgaaatgtgaagggtcaagagtcaagacccgtccgatgacgacgtccgatggttttcgtccgtttgatgactgctagtgttcttacaatcttacaccacctttcccgactcataatttttaggaggagctacagcatgtatttatattgtaagtttataaattacatatgtaattttagtgtatttacaatgtaagtctttaaattacatatgtaaatagtatataatttaagtgtaattagtatgtaatttcaatttaagccaacatctttgctcgatcagttggttaggaccgctggataagccaccggagatcataggttcgattctttgcagtacaattttattttcgtcaaccaaaatagcacgaatcttacagttgatctaatggatcagaaatcgacatatttctaaagaaaaatgcgtcgacagttttttagcctttccgtattttttccacacgtacacttcccaatctactaaacgttacgtattttgtaatatatatatatatatatatatatatatatatatatatatatatatatatatatatatatatatatatatatatatatatatatatgtatatgtatatgtatatgtatactagcaaaaatacccgtgtgttacaacgggtgaacacaattttaattcttgtaatgggaaaaagggaaaatgcatttgtcctcaacagtacatatttttttatcctttgtgggatgatggtaaactgcacatcaccatagcggttgagggctaacttgtcacacgccttgtcctgacaccatctaagagtgacaccgttaatttaaatatttgttattgagaaaaaaaattttgttgatatttttctgattatttaaaatttttgttgttgagaaaaaatagttgaatatcggccatttgatgatggtagcatatttgaactagagaatttttaaaataaataattaaaaaggatagtagagcatcgcatcaagccgctagcctgcgtcgcaccagctccaatggagcgtcggagtggatgcaatggagacgctcgcgtgcattgccgaggtctcgacggttcgtggagagtgtcattgattacaccgacacaaccgcatcgcaaggtagggcacagggaaggagggggtggctagcaggaccgcccaccgtcgacatcatcgcaccctgacctcctctgcagcaccagcggtgctctgactgctatcaccgccatagcaaagcaagatgatgcaaagagagaaggaagaagacaaagaagtatataaatttagacaggtaaatgggtttttaagtgaaaccttcaaaaatgttctcatcgattcatcacttccaataagtatataagttaaatctactattagttaggctgtgttatttccccatgttctctactcccctttctcgttttccacgtgcacacattttaaactgctaaacggtgcgtttttttgcaaaaaaaaatatatgaaagttgatttaaaaatcaaattaatctattttttattttttaataatatttaattattcacattctaatagactgttccgtcatgcatgacacatggttcccaagtggaatcggcgaacacaccgttctacaaatagtactacttttcatctcaaattgagtgagaaaaaaaaacagacaaggcagagagtaccgagaggaaaaaagaaagagaaagaaaaccagagcaccacggcaccaccagataagtcccaaaagcactttctccttcactttccccaccacctctcccccaatgtcctgtactcatgtactcctgtttcccccaattccttcccaccaccggccacctctagcgtatcgcctggtccttccatgccatgcctgctggtcccccaaccccccatctccaagctctttctctccctgctggctccccatcttcacctcgtggcggcatctggtcatgcacctcggccacagcgcagctcgagcagtcgacggggtggagtggcctcggcagcggcacggattggactcggcgacggtggtatacttccggtcagtctctcgtccggatctacttccgacaagcctctcgtccggatctagggccttgcagcggtaatcactggatctggggtctccgcggctggatgccctctcctgcttcgtcgttgcggtggcaatcaccagatctggggcctctgcgcctggattcggttgatgggagttttggagcgaggatggaggtgtgtttgagaataatcacccctcgtctgctgactcgtccccatcgcccgaccggtccacggggttccaggcaacatgcatcgcggcgtctcggcatggagggtgcacagtgttggggttcagctacggcagcttcgtggtgttcgttgtaagtttgtactaactattagtaatcttgtcaaattaagttcgaactaattaaggtcgtcctttccactacttaattgagaatacttgaactcaattcttattctgcttataaaacacattaactaattaagctcatgtaaagcatgcacagcgatggaactttttgtgagcagaagaagcaacttgtttttccctgtagacttttgaattgacacaatgtattctgtcaaggtactgaaccacatccttttgtaggcctgctgtggggtgctttgtgttgtggatagtgggcgtggaccagaagctgattatgtgttttcaccgcgcgaaattggtaagctctacggactcttgaactactataagttatttagataatcatgaaaagatacatgtctgattaatcaggtagtcaattatctatttctttgaggtgatacatagaagcatgtctcttacaccttgaggcatactgctctcacattcattctcttggtacgccaatagttctactaagaaatgcttccttagctcatatccatcctgtatatgcatttatttatgtaagcgaacaaggttagcactgtatgtgtaaaaaggtagtagcatttaaatagtcaatgctaagtgtcacgatacttgcctttataattggtaactgcaattcttcatcattccatttgcgcatgaagagggacacaagataaccagatagttcgctaagaaaaatttaattgttaattaattttgttttagggaaataaattaactggttgtacaatggagtttaaaagaaagtttacccgttgttaattggaacatttggtagaattatttgacgccataggttgatatcctcgttccatcttgacccaaggcatgcttttgccattgcttttggcaagtgtttggcaatccatagtagttttttgacatatcttgcatttgggttgttctcataaattggttcaagcggagtcgggtctaatatatagacgattctggtatcttggtccaatacgatcaaaatgaaaaatttatagaattctattggcataagaatctgtaaaagctaactgttaggatagaaaaaaatcatggccatgatgagcaaatggaagagaacttaccaatctgcattttgaaatattgtagtcaatcccaggccaattacaaactgactttgctagccgttcagtgtcgagcttttgacgaaagtttgggtgttgtccaaaattggtagtcatctttgtatataattgtgcaaaaatgatatacaacatgagacaaaggggataatacatgtgattataaaggcatactcaaaattgcaaaacggaataatacacgtgattgtaaaaacatacccaaaattgcatgtctagatagtgttttgatattgttccctttatctttttcaccatttggatgtcgtcgtatacatgaatctgtgaataacatcacattagaagagagcgacatatgtaaacatgtatggtaacaaaacatgatgttgaaggcaaaaatatatgaaatactaacctgggttattgtcattgttgtcgttgtttttgcgattacgacgagccttcagcacatcttccaggttaacaccaaactttggtatatcggtatgccaacccaattcacctctaggaaagaatagtggataagacaatggatcatagcatccatagtacgaccggatgccttctatttcattgtttcattgttgttcccttgtaggattacactcttgtcaaatgtctttcgtcgctcatttccctcgacccaaactgcagccacctctgaagttattggcgcgttatacgtcctctgatccaaccattggtcaaggttcaatatcacacggtagtcctcgagattctcggcttgccccaaactcctaaactgctcagagtatggattaccacgtagaatgttagttatagtgctgattactttttgatcttgttcgtatagatctggccgacaatgacggtaccgatgctctagggtaggatcatcatcgtaaaagtacaattccagacgcttagggtttgaaccatcagtaccgaatgaacgtatattgtgatacatctggccatgagctcaaaacgtgtaaataccactattcctgatgtcagttatctctctgtcaaggtgacagtaaagagatgtgaatgagaaatgtccattgaaaaatcttatgttgttgcggaaatgttgggcatctgaatcttcgctcgtccacagtctcgtgagttcaggaggtgtgtcttgattggctagtttgatttgtccacttcggcaacagaagccctttgactcatactcaaacttctttttgcaccacaaaatccacaattttctacgggtttcagcatatgagtgctttgtggtaagttgctgtacacgatcttgtctagatcagggatgctagggctctcagtgatggcatcgacaacatctatgatttgtatgtcctgatcttcctcccaacctggaaagttttagtgccaagatataagtttacgtttgacatgatggtggcgaacagcgacaaaattaccttgatcatcaagcatgtcgctttcctcatcagtatcatcgtcaaatatgacctcaccatcggctgcataaaaaatcagtacgtgcatatgtagattaaggccctaactgtatcaaatcaaaataaaatcaaatagagatgacaatgttaccatcatcattgatgtgactgtgatggaggctctacaccattggttcctttagatattgtagacatgttattgtctattgaaagaagatggttagtagtacaccaggatacattgcagtacaacataaagtaagtgtatatagctaggatcctcaccaatgttcattacgcttggttgattagaagggtctacgccactgactggttgggcgcttatggaaggatcttctaattctaacaaggcagaagtacttttgtctcgtctaaccatgaagctttcgttgcgacgtgccatcaatgcatgtctttctccatgcgttacacattttttttggtgatcttgttgggacagggggtgacatatccgtcgtgatatacccagggttctccattgctatggaatatttacttggattgttgcgccgtgatgcacgcttatctttgatccgttctatcacaacttgttttttgttcagttccatatttctatatctcatcctttcacgtgtgtgtttttcttggataacttttgggtctactgctgggtcttcttgttcggaatgtgcagtatgcaatgaccctggttgatcaccccgaaaagtgatgcaatgtagttcatcagcatttgcacgggccattgactcctttttgagcttataggcttcacgacgctttgctagagtttcctgcttttctttgtctgtcatccgcgcataccgctccttatctctgtcttcttcttacattaggatccaagagtggggatggtgatgcagatggcgtggtaccagcatcaagcatgtgtgatggagctggtaagaataaaaagtgtataagaattacaaaatattggtatgagaatctgacattgactgctataaaaggtagggcatagcaaaatttgtctatcacataacatgcatgagttgggagaaatatagatctgagaatctgctattgtttggtaaagacttgtctgtgttatattattttcataagaaaacatatagcaaatcttctcttatcacatactttatacttattactgttttgctttaggttgctgaagtttctgtagagattaggatgaaaaatgctaggaacagaaagttttcaacctgcttccatatttatttttcaaactgaaaacgaaattatgacatcagccactgaattattgcatttttttttcttgattgagtcggtctttagcactgaatcgctaacattgttttgaacactgaaaatatcttattctgttgtagtgcatttatattgtgataggaactcagaaacttcaactaccaagacaggagatcaagatgtctagaatggttagtaatgccgcattcctctaaatattttttgttgggagtttatgaaaactgcttagaatatttgatattgtccttccaaatcattacacaaatgcatcaaaatatgttgtgtctttgttgatggttgctgatgaacttatggccctgagaatacttacaaatgcattttgtatgttcaggcattgtgaatttgtgatcctcaatacaattgaagttgttcacggagctgctcttggcacgatggcttctttggtgatggagcagagctcttagaatgtcttttgatcacaccacaagaacgaattttatttgtggtaccagttttgtttgtatatataggaggataggatgtatgcagcgttcttgtggtgttcggatgtaaaattgggggttcttttggtgttcggagagcgatttgggtgggaatcggagtcggaaaaaaaattgctacggatgcgatctgagaaagagaaaaaaaccgtgcggggaagagcgatctgggtgggaatcggagttggaaaacaaaatcgctacggatgcgatctgagaaaaaaaaactttgcgagaaaaaaacctgcgctaaaaaaaccgtatgctattgggagtcggaaaaaaaaacatgcgaaaaaaaaactgtgcgtcctatttccaattgttgcgacgagcgattttttttggtagtcggacaaaacaaaccgggcttaaaaaaaaccggtgacgagcggattttctgggagttggataaaaaaaccgctcagacaaaaaaaccgggcgttaaaaaaaccgtgtgaaaaaaccgggcgattttttttggtattcggacaaaaaaaccgggctttaaaaaaaccggtgatgagcggattttttgggagtcggataaaaaaaccgctcagacaaaaaaaacgggcgttaaaaaaaccgtgtgaaaaaaaccgggtgctatttccatatgtgggtgacgtacggaactttgggcaaaaacatcttaaacttttataataggtaaagatataggtaaagataaagataaagataaaaataaagatatatatatatatatatatacacacacacacacacacacgcacatatgaaaattgttttaaaaaaccatattaatctatttttcaagtttattttaggtaatgcttacccctccgtcctataaaaaacctaatcctaccaatgaggttcatagctagagttggttttttttttacagtgtagtaattaatcatgagttaatttaccgctccgttttacgtgcggaggggagaggttcctaacccctccaaaagaacacaaccctgtctatccgaaggaatcctaccgggtctcggtatatgacactattggaatatgcgagcatatacacccaaggttttaaatctcccactatagctgcactatctcccgctatagctgtttgagaagggttcttactatttgctctcatatacgattaaccgctataactctatttagcccgctataactatcactatagctgtttgagaagctaacgctaaatgtcttagcccgctatttaaaacattgtatacaccacaactttacaatattactattttttttattttcacgttacaaattttaatagaacattactagcaagatgctaatacattacaagaaaaaaaactaaaacatcatagtcggtagatagagaggtggcacttagaagaagagagagggtggtcatttgacttcagggatcaatatctcgtgttgtctagcatattggatgttaagatagcaaaattaaactatagttctattttagttgctcgaattgtttgattctaccaagcaaacaattcacatatccttccattatttgcaaggatatgtgaattatcttgctaaactgacaccaataagatcatggaacaaaataaagaacctaagtttagacagtgaggctggagcgtggagacacagtgatggtcttgctaaatcatattgtctacggtcacgttgctgctaacctcttccatgcctgcaccaccactttaggcatcacaagctctccccttaactagtgataattgatccttccaagctgaccttacttacccatagcggcaatcgcatcaaccagtgttatgcttactagttgctattgtcatgcatgactgcacacgaggattaccataacaaagatgaagtaacaggacggaaacaaattggaaagaggttgccagggccatcgcaaattactcaacgaacatattattagaagtcaatcatgagaccgtctcgcgcacgtggaagaggagtcgggagaaggacttcaccgcgcgtgggactgcatgtcttagcgatctgggtgtggatcttcatgcagtaaacacgcacgtgggagcgaccgatttggacttcacttatgacacgggacatggatgcacaacgcgcatgatggaagagagtcggacaacagaaaacgtgtgccacagtcgtcgcaggcgtaatcaccccgcatggctgctgaattgaacacgattaccccgcgcgactgaaatgtgaatcggaccccgatgtaatcatgacactcgacatagcaaaccactggtgaagacactttcaatttttataataatacagattggatgtgtgttggttaagagtaaaatatactagcaacgcttaaacttgtaaacaagtgtttctaagttcacaaacttgtaaatcacacatttagactactgaacttgctaaatgtacaatccccggtccaaagcaccatttgaccgcaacacgacatgtggacatccagactggcggtctcgctcgcgtgcaccatgtgtcatgtgtgacaccacctgcattgtgaaccttttcttttaggcccctatcttctttctcatttgctctcttcctccaccgctcgcttccgtcgccctcttttctcccaaatcgcagcgaggtgtcgcgactagggttgcagcaccattacaacgagtcaacgaggttgcagggaggtgtagacatggtgcggtgaggctgagcgaggttcggcgactgggttgaagaaagaggtttggcagcggcggggcaatggctagcccgagtcggagcacaacacaatcggtatagcaaatatctggacaggtaaaagctttgcatctctaattcgatacaaggagaggccattttgattactcgcctgttgttctatacaatgcagctcggaggctgcaagatggattttatggagctactagaatgtagatggtggaccgcaatctggcttctgggccaaatgtgctaaatcaaggtgatgacacaatatgctagacacaagaagagcatcatcgagcatcgtaagtaaactgactttatttgaataaccaagtggtaggaccataggaggagtacattagggggaaacaactggacaaagccaaccaaggagcgattccttctacgcttctaccgttgatgggtacgtggtttgatcctgccagtagtggatttcaaattaactctaggggagaactccacccgtcgaatatactaggaaactgcagagctcccttgcagccgactaacatttcctagctcctaccattgaactcaaacgtaatgtaacacaaattacacgacggaaaaatagtaccattaaccatgtttattaactactctactgtgcttcacagaaaatcaactgcgaagcaaataatcatattaggccttatttggtttagaggggattgaagatgattggagggtattgagggggaataattccacaccataataggtgtgcaataaatcccctccaatatctctttcacagggattaaatgaacaaggccttagagataatagaaatagtttgaaacaaaacattggcagaatgcatcacgcggtacttcgttaatctacagaaaccgacgcagatgtaagaacatgaatgatccaaatggcagcataccatataatcaagataattcataactccagcttgacacccaaaactgacagaaatcggtctgcaaagtgtgccataatgaacccaaaaatgcacgttgcaacacgcaaatacctaggtaaggatcaaattgaaagaacggtatgtagtaatgattaataagatgtgtcacatccatccaaaatctcttttattatgggacagagagtactcaggtactgccaaaactctgaattgactgtgttttgggcgccttttctcaagtacgcgataaaatattttggtaacgaacttaaatgatggctgaaatccaatagtattgctatcgtttaggatttagctaaggtttatttgggcattaatccacgcaagcccttaacagttatatgcacatttccattattggttgtgccgtgcttttatcgagctcgtcttcactcggtcaaaggtttaccttaacctcgctacgggcaatatacctttaacaaattaaatgatagctttaccttttaatcgatagctttactttttaaaacgagagctttaccttttatttgattccctccttttagtcgggtactaacatctactttttatgaggcaacttgcagggcataaataaagttcttgattttactgataaactcttaagggtagcacaatttgtgtgttctaaaacaggttaccgctgttatatcgctcgatagaagacactacgaccctgtttaaaagtaaggtagaatcataaagcgactacctcacacctgcgaaatagacgcatctgagcgggggttgttttcttaaacgaaatgcgctacaaacagaggccaaggatataatatatttttattattaaaaaacaattatatgcacatatagtagactcagtaatgtttgccttctcattttgcggccaaacatagaaggtattattattaccagaacatcagctaggggtcaactggacatttttattaacatcagctacttggtcaaggcaaggcctggtcccttgggccttgtggctcatttgtattaacagaattcaagtctttgctcgaaatgatttgaacggacgcaacatggtccaagattataaagtataaacatacttatagatccatagttacaaaaacatgcaaaatcccctttcttccagttactgatgttcggtaagagctccatatgagaattacaagcaccccagctatccatactttacacggttacaccttgtttacagtttgtttgtaccatgtccaggcaggaagccatatcaattctatatatttcttttctttctttcgcaaacaaatgaaaacacgtttagctacagtacaaaggggcgttggcaggcttgtagaggaacgtcttgacggtgtgagagtttcctgaaggcttgctgtatgtgaacttgaccccagagtgtgtatcacccctcttagtgcaatgctggtgaaagctgctgatgggccttgccaagcatgactcccaacggtcactctctggcatcgtctccgcaacaatgtagacacccttggagtttgtgaaggcctggtagttgataacttcaccagatctcgtgatgcagaggacggcaacctcggcacctatacaaggtacaaagacaagcaagaggaatgggagagtaataagcttttagtactttgattacagtgtacaggtaaacataagtgaggaatgaaaagtgaggaaaacaaaatgaaatgcacaaagtggaagtactaaacaataggaccacatgtatatgcctgcgcaccccccaaaaaaaaacaaagctagcttgtggtaaggcagctaccagtctaccattgtacttgtactagtgtttgctgactaggtggaaagtggaaacaaggaaaaaccctagcaggtctatctgttcaaccggcagactttatactcaaaccaacaggtttctagctatcgccaaaagcaagccccattgcacttgcccctccattagagcttttattattgaagaagtaaatttcacaaaactgcactaccattggggaaaaaagaatcacaaaatcacacttttacacaaaatctctgaaccacatgagcctttctattgccgtaatatcctactggctggctccactcgtcggtttcacaaactcatcaaaaattttgctaacatggaggttcttgcaacactggataagtgctagcatgtcatcatgattgcttggcatctggggttgaataggagggatttttagtagttgtagtcccaatcccaccccaccaagcaatagagcgcctatgagttaatttggtattgcaacaacctccatatgacataaatggaaacagaaacatatcctgagaccaagaagtcaccctaacctactaggcctgccgaagatgatggcaatgtgtaaaagtgtagattcgtagtgcaaatggaagtttgctttgctgaaactataacttaaaagtatggtttcattatagacttttacagttgtcatttgtgaatgtactctaaaaatagatcaagggataagattccattgttcattgaaaactggaatatatgagtataaacaaactgataaccctcttttattgaaatatgaatgaacgaattgtgaaaacccatcagaccgattctggatattcagacctaaagaaagaaatggctaaatgggttgtcgccacatcatgcttcgaccattttgcttgccctttgccaacgctttgtttttgtcattgctaccaatggttctgccagacctaataagtttttagcaacccacaagcacaacaacattaatgatctataggttttcatttagcatcccaacattgctgagagtttcttttttcaatgaacaattcaaaccatagcagaatgaatcggctaacaaacagaagataatttcgagagtttacaatgtgcaagcagtacactccttggcaatcaccaagtcctcctaggagtgcataggtactcagtgcaagcctcaacgcaccaaaccttagccttccttgtctgtggttaggtactaagcgccagactaccgccttgccacttgccagactctagtgccaagggtaatattgtaggcaaaggatagaaaccggctacttaatacttaatagtgaccaggtataaagaaaaggctaggtccagacaacgagcagaacacacacctgacttgatctgaaagctatcgacctgcagaccactaacaatatccatggactttttaaccttattgatattgatgtttcaacatttaatcctaccatccaaatgaaggatctatggcttcactgcatttctttgcagttagcatttggtattatctaattatatcaaaccacaggcatcatcacgagcaatactcaatatttttgctactttgattagctcaggagccaaatactatagtaccatgcttatgtgattattactggggagcgaaagtcaaaagcaagagaatggaagtactggacaccaaaaatggacccaacaattttacagggtaaactccttgaacatatgatcggccaattcgacttcagttcttccatcttagtaaaaacaagttcctgcaagttgcaaggtcgagtaggacataacccctatttgacccctcaaagaagaatatataacagggaaataaaacattgacaaccgtttttcagtttttatttctctgaatcaactgtcatgtatgggtgaatctggcaatatggttaaacttttccaaattcccagaacaggacgtgggtagagtacataaacaaatttgggaaatgggaacacaaattggtgaattgggcaaaaggccaagattgcaaatttcaccatcaaggcagcaattcatttcatttcaagacaaatgaaaagggtcgattcaccgtgcttcacgtgatcagatatcaaatccatccccaacctatgtccttctaatactgggaatacaaattacagttccttctaccagttcaaagtaaaacttcgaattcgttagaacggcagcaagcaactacgctctccatcgacgaaccgcgccccgcccctctcaaatgcaacgcaacctccagctctaccgaacggctccaattcctccactaggtcaatcatgagcgccaacgcaaggcaagatccagaacaggggaagcggggcagccgactcttaactcgagatccactctaggaaccgcacgcacgaaatcgacatcaaggaccgagctacgagcacgcaaggctgtcggataaggaaggataccttcgaggacgtggtcctcggggccgatggcggcgtccccgcagacgtcgcagacgacgtggccgcggatctcccccgtccacgcctcggccgccggggccgctaccagcagcaaggcgagcacggcgaggacgaagagagcccgccggagaggaccggccgcctccgcctccgccgccgccatggattgggcagctcggtagtttgagcgtctcctccgatggtgggagatggtcggggtaggtaggttggtggccgcttgattcattgattgacactagcgagctagagtagggaaccagcagaagaaatgagatgattttacggttccaccccttcctgcaaaatgaggccttgggcccaaaattttcacaagaaacacaatttccctaggagatgttcttttgtcttccctcaactacgaccccagtctcattttgtgcactcaaccacaaaaccaaatactccctccatctcaaattaatcatcatataatatttatataccaagaccaaggataatttaaactgcatggatcaagacgtcatgcacaatattatgcacacattctcccacaatgcatgcatctattaaaacataatgcacaattgcactcttgacatgcaaaaattctcctgtgctgcattaattgtactctgataaaatccgtgtccatgcggttatatgatgatcaagttgagaaattttggtttttgttatatgataaacaatttgagaaggagggagtaactcttaactataaaaaggttcgttttatttttggagtaattgtgtttctactcttgctttacgattcaattgtgattttactcctactttttagggtttgtgattttgcccctgctttttaaaaacgaagcagccacgtgcccctactctgttaactaatggtaacggtgttaaatttgtggtgaatggacaaatatacccctggacatgttttgccattcaatgataatttctagagcaaaacgaacactaatgtctgatgattagaaaaaaggaggtaaaaagtgacagatatttgcatttttgctcgtgatagagatttagacttgataaccgaacagttgcatggtatttatgccatcccaactaactaaatgcacaataatactcccgtctcctccggcgtcggcagcgccatggaaggcgatgcggtgctcgactgcgacgtcttttcgtacaccgacgctgacgacgccaacgcgcacttctcctcctccgtcttcgccagctcagcctctgactcggccatgtactcatactccgacgaggagcagctgctcaccactggcgacggcagcccgagcgagtccctctcgtcgacggcaaagtcgtcttcctcaccgtcatcctcgtcgcggcgcctccagaggccgtcccttcgcatgcagccgcggggccgccgtgcctccctgcgcgagcgcccgccgcgcctccctgcccgcgcccgactccgccgtgtgctggcccgcgccaccgctcctccctgccgcgtgctggccgcgcgtcgccgccgccgcttgtcgcgtgcgccgccgccgccacttgcaaccgggacagtaaaagggattggggattttgctcattgaaccaagggtagaatggtcattcacaaatgataataatattatctttcttcatttaattaggaaattatgggcccaccaaacttctgtcaaaatcagaggtagacggctgcttcatttttaaaaagcaggggcaaaatcataaaccctaaaaagtaggggtaaaatcacaattgaattgtaaagcaagggtagaaacataattgcccctttacttttccaaacagtttggacgttggttttatcctacgtgacaagttgacctaaagttgattagcaaataaataaatataatagtggacccagatgtcagtaagtgaccgctatatttttcttctgccctcccttctctctcatctcttccccatctctctacacttctcccctctctcttggcgaccttcaagggcgatgctcgatggaagaagagccagaggcagcggcaacctcgccaccagtggaagcggaggtactgggagagattaactgaactgggaggacttggagggtcgcgatgaaaaagctcgagggctcgctatcaaagaactcagtatcggtcgcagtgaagaaggtacatgcaccttttgcaacccaaccctagtgccattgggctccactattcccctaaacaccgtgccgccaatactgaccactgcagctaggtgtaggagagctcgagctcaatctcctctctcctatcagacaatcaagcctgggaggggatgaagggaggggcacatgcaatgctcatggtggtcggcgaggtcatcaagcgggagagttttgagctcttctgcgtgctcgagcttgtgctagccactaagttgaggaagcaagagggaggaggtggcctagcaaggaggtggaggaggaaggagcgagaaagagagattggcaccgtcctcgcttcccccatgagtggtctggtccgatggatcaagcatgtggcaacagtgcacatcgagcaagcgtagaggcccactcgggaaatgttgaagggactccgtcaccatgtcacataaaaaaaacctagtgtaagctgttgacggtcgttatagaccaataaaggagaattagctatgcttataatgcatatttgttttagaataatatagttccacttgtgcttggagaataatttgttgcaggaattgagcaaataaaataaagagaaatgaggaaaagtcactcctaagcaagcatatggataagataggcccacaagacaggtgtaaccgtcctggaaactgcattaattgccacaaccgttataaggaccaacctatcagtgaccctgccgaagctggaggcctgttgggccagcctaggttcggccgaaccctagcggcgcccaatcagcctggacctccacatgtacactccggatgcactctcaatgatggttgcggggtagaatggtcatttcgccttttctacaaccgtcataccgaccctataaaaggaggagctcatttcacttcacaacacactcaagcaagctcaaatatctcttctacactttagtttagtattctagtgctaagtgaagtagaatagaatagctctcggagtcctcggaatcttcggaggaatttcggtatgacagtagttttccttctttcttttgtaagactttcggaattaatgaaatactattctctatatgctctcggtactttagtatatctaagtattaactttgttttatatctgtatcggtacagtcgtatagttagcctaccagtgcagtggtgtgggtttaatgtccgattactcggttactctatgtcatctcgagggatgtagagtagtatttaataatgtggacatggtgtctagattattaagtagcattatctgggcatatatgctacgggtcagtcgaggtgggccgctgatagtgacagctcagtacgggtattcctctatgatagtatatattcctaagaaactttcctagggagggtactcctccatatttagcccccggttggacggccatgacaggttttcgtaagaaactcggtaacccggagtggtctctcgaagcaccaggagggcattgttacggggtattggttatatggttgtatactaccagatgtggactaaagttgagcgtatattagaattatataaattgattgcttttctatttcttctttcacttagtttaggaatgattaaatgagatatatgagtgcttagctttgtgtcaccctaccggtataactattttaacccatgcttagactttgattatacaagtggcatgtatatattattagcacagttctctcttacaatcttccttgggattaaataaatacgatatcttggaatactctcgagtgaaatggtataattaatggtatatccgtgtgcttgcggatttcttttgtaaccatatatataccaggaccatttctagcgccattgctggaaatttatatttatactaatgtcgttaagaaatatcaatataagcgccatgtaaatgcgatataagaccaatcatcattaaaactatccagcgaggtaaattgattcggtttaacaattgagggggtctttatacctggttttatggttgaagtacgtgaatcaaactatgcttatggttaatgaaggcagagtggactgtttccatttccctacatgttcatgtgcatctaggacacgaggaaagaactttctgatcagtaacatattgttttaagcaaatggtccattttgtatcccttaaggtaaaaaatccacccataaactttaattggatgctatgtatattcctaaactttctataatgtttatttttcatcttttgactaaatttgaagtagtattaatgacaaggtgctgatgtggcaatgttatttagtcccgagtacatatattatttcaacaaatattagtacatgtccccataaaaaataatcaaaaacttatcacctctcttatggatcattaaaaacaaatttttttttgaaaggaacataaaatataatttgactacttaaaaatagtgcttgaatctgaataaaatcaaaatttaagagagaattaaacattattttggttggatcaaatttatgtaaattatttttttccaatttgtaacaagtatttctttatgaattttctaattatgttactaatttttaaaattcaagtacataaaccatggatgcaatttaatttgtattttccaaatttatattttacttcaaaagaatctataaaaaactttcagttgcatattagcattatttaacctaaatcaattggagccattgtaaaacggaggatgttccaagaaaaaaaaatgtattcatacaaattataatactattttccgtgcaccaaatattgtttttattgcttacaaaatgtattagatgttttacataccatatgggataaatgatattttttaagtcatttacatatttaaattcaaaagaatttttagccttaaaatacatgctatgtcatgttgataaaagcaattaaaaattttattgaagtctctctgaacaattgtctttgaatttttttgttgaacataattgaatttgaattgattattataaacagatataaagtaaatcacaatatatgttattacaaatcaaggttttcttggtagtaattcactgtatgtgttgttcgatggggtttaattaagtaggtactccggcctctggacaatattatatgacgttgggagtattaaatgttgcaagaattatataacttgctcaaagattttgagaccaaactaactgacctaacaaaaacttagaattgataaactacttcatacaactcgcaaaaaagtgacaaaaaagcattaagggagaccaagagcttacgcccatagattactcagttactgccaagtcaacaaagtagtggccgagatagaattggtctagctattccattctcatcacgaaataccatattacagagcaattgtgcgcatataaaatagagtacatgctctagataaaaaggaagaatgttcgataaggatgagaaaacataaagtatggatggaccgaacaagcgagattgtgtgtctttgaaaacataggttgtgtttagatcgaggggtgaaaggttttggcgtgtcacatcggatatacggacacacatttgaagtattaaacgtagactaataataaaacaaattacatattccgtatgtaaactgcgagacgaatttattaagcccaattaatctgtcattagcaaatatttactatagcaccacattgtcaaatcatggagcagttaggcttaaaagattcatctcgcaatttacacacaatctgtgtaattagttatttttttatttatatttaataattcatacatgtattcaaacatttaatgtgacatagtaaaaaattttgccggatctaaaaaaatagtcccatacaaacacctccacaagctaattgacatattaaaactaacgtgcatgtaaagcatgctagctcttggaaacaaatttagcagttcaaggcgggaagagtggtggccacatcaacccctttgacatcactgccaatggttattcatatataccgttgtaacaccagcatatactcctatattgactatatttatatctataacaacaagctaggttgactgcgccattggaaactatacatggccatgtgctctgcacctctcttgacctagctagttagagaaagcaatgtcttccttgaattaatacttgaccgacaagataagaatttgaaatttgtagtttgttcaacacatccatatatgatacgcctcggtggaggggcaggcaggcatggcgtgtgcaaaccacgcgaaaacgcgagatacgctgaacctgttgcatgtgcatatgcgcgacgcgcgtccgttccacttggccggatttgcacatacgtaatgtgaacgcgagccgttgaatgcgtgatcccgttttcctttctcggctggcggcacgagacatatcgcgccgaatataccaccagggggtagaggagatagcttggatattagaataggaattgttcgggatcttcacgtcgggggtacgcgcgcggcgctcgtttcgcaatcgtcatcgccgacgtcatgcgcggggcatgcgttggtactaaggccagcgaactctatgggttcgtacgtgaccgacgtgtagtgcacgtatgagagtgtaatctctattttatatagcgcggtagtactaattaaactgttagtcaccaagggtactaattacttaatttgattaagtgcaccgttgcacgaagttgttcttttagaaaattatgcatggtagtatgaaagaatcgaacagcagaggcggatccaacgtttgtatcgggggctcgagcatcctccttggatccccatgaaaagaaacagaggggagggggaataagacgtacgaagaggaagaattaatagtagagggtttgaagagaaagaactccctccaaactcattctagattcaatataataactgtaaagtatatacttgtgtaagggatcacttatacatttgtcgataattttttttttcaaaaatttgacagatacaattatagtacaatcgtgatatgattatactgtaactataatgtaactttcaaaaatatctccataagatgctatttcggtgaagctgaggtcgtgggaatgaatcatctcacatgtgcgcgcgctgtgaatcttttccttcctcacttgcacaaattttgaaacaaatctaacgattcaaaattacatgaaagttacatgcaaattatagtataattatactgcggtacaatccatgtatatcaactttttaggagaaaaaatgttaacaaatatatagcaaaattgcttgtgtaatgttttctagccattgttggatatgcagtttataaaaatcttttgctctatgcataaaaaaggcaaaactcagttctaaatccttctattgagaaatgcttcaagccatatgatttgttaatttatgagccaaacgctccaagccataataataggaacatcactaataagtaagctattgttgaattagtaccggttaactatttatgttggttttcatagtcgaaaggatttatgggtttatatcatggtatctacgaaatattaggtcacttgtatatcatgatcatacctgaactttacctttttgagttatattaggaggcgtattcacgattagtatataagtacgggttaatctaaaaatatagcgacatatttttaggtaaaagtatatcaaatgtaattataatataaacctagtgtaagtatttacatatgtaacactagtacacgattgattttcctggacgctgcccccttttggttctatacggttcgtaagtgaaaccgtatggaaaaatagaaaaccggcgccaggctatcgcccgcacgggaaaataaactgatttcccgttcggttctatcctcttttccctcctatccacttcgaaatttcctcggtaccctccctctcctttattctctcacgcgtcacgcctcctatcctctcctccctcggtgacagcgacggcagcgtgcggcgggtgtaggcgacgacgacggcccacggcgacagcgtcggcagtgcacggcggccgtggaagcacgggatatggtgggcggcggcgacgacgaggtggcgcgcgacgattgcgccggatccagcggcggccaccccacgcgcggatccggcagcggcggccacccccgcgcggatccggctgcgtgatggcggcagcggccgccccccgcacggatctggcgacgcgacagtggcggcggccctcggccccacggatccggcgacggcggccgccccacgcgcggatccggcggcggcgggcaccccccatgtgtatccagcggtgctacggcggcggcggccgccccacgcgcggattcggaggcacaacggtggcggcggccgccccccgcgcagatccggcggcagcggccctccgccgcacagatccggcggcggcgacgggagcgggcggtggatccggccacggcaacggcgacgacgacgggaaggaggcgacgggtagggttagggtttcgttttttcaatttcgttttttttttcgattttttgtttttgcatgtgggcgacataagcacccgcacgcgaaaatcggattttcgcgtgcggttgcgccacccgcacgcaaaaatagcgattttcgcagacaaattgctctagacgggccgaagctctgcacgcgaaaatctaaatcgaccgcacgggaaaacgatatgtgtagtagtgtaattatgaaacttacatatataattttcgaacttacatatatatagtgatttatattgtaaatacactaaaattacatatataatttagggatttacaatataaatatacatgctgactatttttcaaatatacatgctgactatttttcatgaaaaatatgatgacacatttatagcaaatccgtataaggttgcgttcgagagagcatgttcggaacgcttgcctcttgcacaaaaaacggagcgatccattagcacgtgattaatcaagtattagttgaattttttttttcaaaaatggaacaatatgatttttttaaataactttcgtataaatttttttttgaaaaaacacactgaaatagcagtttgaaaaacgtgcgtgcggaaatcgagaaggagaggttgggaacctggacaaacgaactgagcctaagtatctatgttggaaaaaaaatccagttccttaattaacagaaaaaaatattatacccttgtcgagcacggcgcgcactggtggagaaatgctttctagtcccggttcataacccccctgtagtcccggttttccaaccgagactacgaatccgggactaaagatcgctatcattagtcccggttcaaataaccgggacaaaaaatcaatctttagtcccggttggtgttaccaaccgggactaaagatgagagcatctttagtcccggttgataacaccaaccgggacgaaagatattttttcttttttttctgcttttaatattgaatattgatttcacacaatcccatcccatatccaaatcatcacatattacagaacatctccaaatcctcaaacaaaccatctctaaatatatcacaaactcttaaaaaaattacatcacaagattctaaaaaattcatcacagattcacatctcacacaaaaatacatcacagattcacatctcaaaaaaaaagaaaaaaaatccggccggcggccactgccgcctcccctccgcgccggccggccggcgccgtgccggtcgccgctgagcggccgcccaccgcagctgccgcctccgcacggcccccggcgccgccgcgccggccgcgcaccgctgccgccgcgcggccccccgcgccgccgccgccacgcggcctcccgcgccgccgcgccggccggccgccgccgccgccgcgcaggccgcctccgcgcggccctccggacgggcagccgccgccgccgggccctccgcgcggggcagccgccgctgccggccgccagcgcctccaccacctgcctccgcgccggccggcgcttgccgccgccggccctccacgccggccgccgcccgctgccgccaggaagacaggggagagaggaagaggaggaggagaaggaggaagaggagaaggagtgaggaggagaacgagtggaggggaagaaaagctaaggataagactgaggagcagggtcagacaatggacacgcgaagagataaacatcgcgctcggcttggggtgatttttagtcccggttgttctaaacaaccgggactaaagatggatctttagtcccggttgtttataccaaccgggactaaaaataattggggcctggcacgacctgacaacctcttcaaccgggagtaaaaatgatctttagtcccggtcggtgttaccaccaaccgggactaaagatcaaaaaatacccctaagtttttaaaccgggactaaagatgctttttagtcccggattttattggaaccgggactattgtggaattggaccgaccgaccaaagatggtttctccaccagtggcgggtgaccacccaggcagggttgcctacttgcgtgcggagctgctggtgcctgcttccttgtcatcgaaaaggaatactccaagtgttccgaatcttttcaccttgttgaggacgttccaagtgttccgacgttgtgcttagaattgtcatcactgacgtcagcaatatattcaagagtttcgatatatccaagcttatggagcatgttgtgtagttacacacgtgctacgtactacatgcatgcatgtatccgatattagtatatctgaacatttttttctatttatggccacagagaaaaaccacatcataaaacatatcgttcagaacaatcgcatcgagaatacatgtatgtacacttgtagacaaattgtcttaattttgaaaataatacattttctcgatcggtgcatagtttcgtgctttcgatatagaaatggagatggctcaaaaaataataactaattgtgaagacgacttgttcgttcaaaaaataaaattgtgagatgacccgcgttgaatttctatgatattcatccattttaaatttctctgactatttatatttcataggaaaatgtgtacacacagtagctaggtatagaccataataattaatattacacatgatttgaattctctgggtccatccggaaacggaaagctttcttttccaacaaggattcgtgctggtaattaactcatcgttcgtaaggaatgcaacactgtcattcctatgggcgcaatgttcccgaccggaataacacagtaattcttgacagttgaaatacgagaaattcgataatatctacatgcatctctcaatcaactaagtgtacgttgatgtacgctacctgtatatatgaagaccacttctatagttaatatagcatcagataaacattttttacttaacacataaaataaacatttatatatgcagtccataatccatttacacaggtattttttccaagctgccctataaaagtgcccgtatataaatcaaggatttgtgcgggcggattccacaaccgctgactcccttaaggaactggccataaaaataaattttcagtttaattttgtaggcgcaaaaagaatcctaaaaaatattttatattttagtagacatgtagtggaaatgttcatttgacgaggtaaataatctgaaaagaaactaatccttagctggtgagaaaatcttagtggaaatgttcatgagattatctggcatagcttcaactactgtgctgtgaggaaacaaaagtatagacactactgtgaattcgtgatcacaattcacaataaggttagggtccttccactttccaattcccagttgccaacttgttggcaaattacacagacagagcgaagcacggaaagatgcaacttgccctctaactacacaacgtctgtctccacctatatataaacccttccatctctcccccacacatgcatagcagtgctagagagagaaacaaattaaccaagaaatcctcttaagaaggatactgacagtgcacgccagctagctaatcactccaccagtttcggggaaaaaatatcaaggatttcgagatcctagctcgctagcaggtgatcgatcgatcgatcaatggccctggtgcagtcggcgcggcgtgccgcggggccggcggcgagccggctcttctcgacggcgtcggtggcggcggccgggcgctcccccgtggctggcctgccgaaggcgctgccgcggccggccatatcgtcgctgtggatggtcggcgccgccgctccgccccgccgctttgccggcacggcggcggtgggcggtgtcgacgtgaccgcgccgacggcgacgccaccgccggcgaagaaagaggaatcggagaaggaggcggcgagctactggggcgtggcgccgacgaggctcgtcaaggaagacggcacggtgtggaagtggtcctgcttccgggtacgcatgcactggcacagcacgttgattaattaattaatcagttaacaaagctccgttaatcaccgtcgttaaagctcgctggttaactcactctactgttgaacagccgtgggacacgtacgaagctgacgtggcgatcgatctgacgaaacaccacaacccggcgacgctcggtgacaaggttgccaggtggacggtcaaatcgttgcgctggccggttgacctcttcttccaggtaacccttcgctttcctcatttctgtatcgtttctgaaatgaaatgatgtagtacaatctaatacaaatcacatgcaattcctgaatctttaactatgctgctgcctactctacatgcttgcgagtcgtctacatatgcttggaattttttttcttagcatagagatcattgatttgtttaactgaaaaattaatcaaggatcattttcgaatcggcgaactttacagccgaagatctggaccgtccagtgaattcagttcagctggatgagttcggaccatacggctgagcagcttcgaaagaattgaatttgaatgaactctcatacactcgatcttcggaacagtgatctccgggcccattgatccactacaagcccaagctcaaatacggtcctgttggacttgggccgaaccgtgaataccggtgaactcttttgggtaatcctgttgttgggttctatgggccctggcacgaaacaatggccgggccgggccgggcttggtagtcttggactgggcttcgggttccatttgatatttttcaacctgcaagaaagaacatgcttgactgactgacagacaggtaaccatactctgttttcccctgttctttcgagctagtactaactgctatcgtcatgacccgggtgagattgtaaatggaacgaacgattactctaatgagattttatcgtgacgaagcgattaattcgtatcgagagttgataattgatcagattgctaatcaactagtagcagcaatgatgaatgaattctgatggtcaatttggttgtcagaggaggtacgggtgccgggcgatgatgctggagacggtggcggcggtgccggggatggtggccggcgcggtgctgcatctgcgttcgctgcggcggttcgagcacagcggcgggtggatccgggcgctgctggaggaggccgagaacgagcggatgcacctgatgacgttcatggaggtgtcgcagccgcggtggtacgagcgggcgctggtggtcgccgtccagggcgccttcttcaacgcctacctcgcctcctacctcctctcccctcgcttcgcccaccgcatcgtcggctacctcgaggaggaggccgtccactcctacaccgagttcctccgcgacctcgacgccggcaagatcgacgacgtccccgcccccgccatcgccatcgactactggcgcctccccgccgacgccaccctcagggacgtcgtcatggtcgtccgcgccgacgaggcccaccaccgcgacgtcaaccactacgcctccgtacgcttccctcactccctcaccttgtgttggacgatgcatcatgtctcgcaatttcgaagcaaaacaaaaaggagaagaaatttgaacgaattttgctaactttgtccatggctgtggatgtgcaggacatacattaccagggtcacgcgctgagggaggtggccgcgccgctcggctaccactgatcggacggacggacacgatctatcgccattaagggatcaataaatatccggagacaataattgtagtattatttggacgcatgcaatgatcgttgcagttcctctcaacacttttgtgatatttcagaattcagaattttttactccttgtgctgtgttcgttgtggttgtatatacagctggtttgttagtttactgtggtgtcggtctcaattaagggatgtgaaaattgattggaactgtgaaccaatttattttacatatatgatactatatgtcttcttgttggtttcgttagcactgatgcaattgcagtctggtcgtttttcggaatttcttcccgcttatggtggtatccgtgtataatggatatttagggtgtgtttgaggagaagggattggggagattgggaagatacgcaaaacgaggtgagccattagcacatgattaattgagtattaactattttaaacttcaaaaatggattaatatgattttttaaagcaacttttctatagaaattttttttaaaaaaacgcactgttcagtagtttgggaagcgtgcgcgcggaaaacgagatgattttctctctcaattccccagattgcccaggaacgaacgaagccttagaaattttagaaattgggatttgagatacagatgatgccttctatgaacggcatattttttttcaaatcaaaacaaatggatgaggtattttcggcgcgtcccacttcagcatcagcgtccagtagttcatgcatgggcgccagaacgcgatgttgggcttgccagacactatggcggcggcgcaatacgggtttctgttttattcttttacaacattatacagctctacaatgtactgctgccccacatttctcaacacttgtacagttcactgatttgaaagattcagaacaggaatgttccatcttctttttttttttcgaataaggaatgttccatcttttttttttcgaacaagaaggaatgttccatacttccatctacatttccatggtatatcagtacaccctgtcactgcttctgatggtataaacaggaatttgagatgcaaataatggcttatgctgtcatgcaacagatgaacgaaaatttttgtctccagaaatggatgacatatactgaaactatctaagaatagtttaaagaccgatgggaacaatgagaagcataacatggacatattcagacggttttaggtagcctgacaagagaggcgtccggtccaacaaggttcaggtttacacaagttaataagagataccaactttaataagagaaatcaacttcttcctgggcacggtagcacgtcgtcgatgttagacaatctcaatgtttcatcactcaatggtcattcatgtctcaaattagacatttctaacctgacacttatgactcacactatgagttgaaagctccaaatttttcacacagaaaatgtcagtataaagcatccgaattcagaaggaccatgacatccacagtttatacctaacaaactgttcaaaacaaatccatcgttgtccagaacaacctgaactgctgatttatgtttcattttagcactgcaaatacgaaccagcttcacatttctagttcataaaaacattggaaacaatctttgagaaaagaagaaaaatcagaatgaacatggaagtcttaagttattaatcagctgtcagaagtgagctagaaaacttacagggtgcatcattcagtaactaagctacgcagagatcagacgttctcaaagaatgttaaaatgattaacgtcacaacaaaggaatcaagcattgaaacagaggcatcatgcatcaatagaagaaatagtaacagaggtcacaaactcagtaatcagcacgattgccatgggtcaggaaaacttttaccaaaacctcctaaccgcgagtctgaaatattgccagagataagcatcagtaccaaaattttcattcatgtcatgatgtagtaacaatgattcatgtctcatttcaccagagtactgaaaaatctgcacaatattgctgtgtcataagaacatgtgaaacagtcgtgcagaaatgatgaaagaatcaacatgaaaatagcagtattaagttactaatcaattttcagaagtgaactaggaaattgtagcaaggcatcattcagtaattagaaaaatgcagagatcaaagtttctcacagtagaatgataaaatgatttaacagcacagctgaggcatcaggcatcatatcaatggaagaaacagcaagacagatcacaaccttactgcatcatcactcatcagtatctaatcattcatgtctcaaacctcactcaaaacacattgcaaatttttgaaggattaccagatctgaattaccagaataccgaaccaacctgcacaaaattctacccatcctgatgttcctgcagtctcagctgttccccttgtttgattagttgctccataaaccacttacgactaagggcctcgtatgggggcagatagaaccaagtccacggcgaggagtctgatggcggctctcgcggcaggcagcggactatgccctgctcgcagcatctgccggtgtcgccgcaggggaacgggccctcaacctgctgcacctgcgaggtcgagctccctgcgccgttgaacctcgcggagtcatccaggaagtagatgttgggagggcactggctagatttcctcatctcgacggcgcaggagcagcctcgcacgaggaagatcgtccggtctgcgagggtgtccaaggtgagtttcttccaggacggtggcttcagctccagcttgaagacgtcgaacgccaccgtggccttctccgtggagacgaacctgacgaccatgagcagctgcccgcgggattccacgaggtagcggccgagcacctcccctggccctggcatggtgggtcggggatttcggcggagctggtacttgttcacggatgacatcgtgagctcgccgtgcctgtcgttggccttgggggtgtacaccaggaggtcctccttgttgttgaggacatagaatcccccaccgagcgggccgaagaagatgtagttggcgtcctcgattgggtccttggatagctgcttctgccacattttgaaccccgagtcccacttcagcatcggcggcacccaatcgctcatgccggggcgccagaacatgatattgggcttgccggaaactatggcggcggcgtagtacggatgagcctgacatggggtataggagaggatgacggcttggatgtggttgatgaaggtggtatcagggttgttgttgcggagggatctcgggaggaggacgcgctcgccggtgcagaggttgagcagagcgggggcacgattccccgggacagagcggtcatcatgcggaatctcggcggcggcgacccaaccttcaaggtgggcgccgcagaagcgcgcgccgcgggcgttgtccggcaggcagggcccctggtgggtgcgctcgcaggcgacgcagaagaaggaggtcgcgttggtggacggcatgaacaaccacggttgcataggcggcagatgccgcatggcgatggtgcgccaccttgtgcagacaccggagaacatggagtggtcagggaggcaaaggaggtggtggaggatgccggcgacgcactcttcggggagctccgcccacgccatgtttgcgtcggccatgggagggggaggaggaggaggaggatgagtttctggaaacttttggatgggattgggaatggtgggaagaagaagaagagggcaagtgggaagattcgttgggaagggaattgctgtgattttataggctcctcgtctgaagccacgcgaatgctaatcattttcttcttgcttgccaagttttcctattgttctgcatttccattgttctacactgatctccaagcattactctgttacggtatctgcttgttctgcattaatttcagtttattgtagaagattatctttgtttatactatagtgctttctatattcaaagtaaaaaaaattcttctgttctgatctttcacaaaatttacacagctctaagatgcgttgctgtgttacgaacccactccatgtgatttagtgaatttatgcacaagcaaacaattcttcctccaacacttgatacatgagtatttggggatacaaatagaggaaatggaatcaagactgggaatcagctgtaggttgaagaagaagacatagatagagattggagaagagaagagaggtacagaggttgaagaagagagagcattagaaggaagaagtcaagttttatctgttctattctgtactgttttggctctgctccttttgtagtggctggagtggtcggcttagcgcagcggattgggcctagccagccctgagctcaatatgcataccaatccgacccaattacataacattctccccgccttgaaaatcagcttgtccccaagctgatgcaattgaagctcaagatcagtgcctccaggatcccagggtagctgcaagtgatcatcaagagctaatccgtaagcaccagctgatccataaaatgcaaccacaagagacgactccatgccaatagaagtgacaaaacttgcactctggtggatgcattgcacctccatttgtccagaattatagttagggatcttgatactagtcccaagctttctatatggaaggacaacaaatatggtcaatgatagagaaatgctagatactgtgcccacttggatactatcatgagcattcttgtacttgcaaactgagctgagatcaagagtatcactccctcccttcttcacttctgtagaaatttggcaagctattatagtaactaaattgacaatacctggatcccaagatcttattcttgtcatctcagcaatcttgacatgcacaagcttcactgccaattgcacagtcccagcatctaggaaatttatcagggcaaaagcagataatagccatgtcctcccaactgctacaacatggatccatttgcttggcatgacaggagtccctgtcacatcatacactatattttcagaaacactgcaatatacaatgctgatttgatgacagtatagcaacatcttatcaacaccatcaatttgttgctttatcattccttgaaaaggaaacccttggtaagctggagcatccaccatatattttctccattgataaggcttgctcaagaaataattagctgagaatttgaaccgacaccaactcataacttgttgaaccagtaaattttcattctcaaatcgagttagattgtagcttgaaactagctgtcccaatgactgcataggcagagcagtatcaatcatatctccaactaaaagatttgaaaaactgtaccaactggacttgacaacctcacacttcagttgctcttccagtaacatccgttcacccaacaattgtagaccttctatggtagccttggggaccgaatagactgttacgataatctgaatctttagtttctgaccatgtagattcagtttttccactttagctttaacttctgcttgaataggtggtggccagggctgtaagagcttcaccaccacgcctccgctgccttgattaaatatatctggccatggcaagaatcgaaaatccagtgggactgccagtctccagggaggtactacttgcggtctagctgtgaaatctgcccctgagacaaaatcatcgcagcagacctcacattcagaagagacaacaggaaggttggtgacaacaatgtgattgctccggcacaaagtcaaacacacatctgtaaatggtctgaacacaaaaatgagcttggtatccaccttggtaaacttgacacaattatcagtgaccataccaccgacatcaccatcaaccttttcctttttgctttttgtcaaacccttggttggtttcactgtcaccatactaagcttgttagtgttgacaagatgagttgagttagcctcattactgacctctgataagatgggtactggatcaatgttaacgcttagtgccgtggcatctccattgcaatccacactcacggtataatcctccttggtgttacggcatgtctccaacattttattgatcatggccatcatcttagtgttcaagtcctgagtggttttctctgatttcaacacctccttgtccatgccagccccaacatccttggtctcggtggaaggtgccggagtcgtcatggttgttgatgaagttgaggatgccaatgaagctttagtggctgggaacacgcgttctgttgcagctggtatgctcttggcccctgacgtggtggtggcataacttggtcccaacgtcgaacacttggtgggcatcacgttagcaccatttccagggaaagacgcgtgtgctggacatcaagcaggcaacacccatcgtaaatgttgcgttcattggtgtcagatcgagccctttctgcgtcatagcttgaccggaaccagactagcgcctcaatgccccaacaactcgtggcgagcacttgcaccgccactgctccatagccgttgtagacttgatgtagtacctcgctagtcatcgggtaaaggacttggctcacttggacacgaagaacagcgccagcaccagctcccagccagctcggcatttctccgaacacctggcaggcgcctccagtgaaaccacctccaatgcttggatctagcctctggacgtcactgctgccactgtgtgtcatccaccttgccttctggtatggaatcccacggattgttggctctgataccttattgttacgaacccactccatgtgatttagtgaatttttgcacaagcaaacaattcttcctccaatacttgatacataagtatttttttttttgcagggtgatacataagtatttggggatacaaatggaggaaatggaatcaagactgagaatcagcagtaggttggagaagaagacatagctagagattggagaagagaagagaggtacagaggttgaagaagagagagcattagaaggaagaagtcaagttttatctgttctgttctattctgttttcttccccatttgttggctctgctccttttgtagtggctggagtggtcggcttatcgcagcagattgggcctagccagccctgagctcaatatgcataccaatccgacccagttacatgacatgctgccccacattcctacttgttctgttctttcacaaaatttacacagctgtaagatgggttgctgccccacattcctactgatttggaagattcagaacagggaatgccccttcaatctaatacgtagttaatttctataggcagacatcactgtcacaattttcatttccattctgctgattcaagtaactaaactggtttcatttcccacttcagtgcaaaaattgaagaatatgatattcgttcctgggcaatgcatactgtacttatttcaatttcagctgagattaatgaactcacatactcctattgtaagtaaaaacttgccacagtattatccagagaatgccagctaaaattaatgtaactccgtagccttgtgattgaagtactgaaccattaactttcttcagttgcttaagtttagggatggcaggcaagaggcaactttcataagtcctatgtcattctgaacaaaacactgaaaatatacagcagttcagacaagcaactaaaagccagtcatcaacaattgatcaatcagtcaacctgtagcagtcttcagttgcaactcaatcaagggtcacacaagttaacgtgccagtagaattctaatctgcaatattacaggatatcaacttcttcctgttgatggcagcacgtcgtcaaattcaggcaactcagtgcttcatcatgcagcaacagccactcatttgaaaccagacatcgagtcacttacaacacattgtgaatttgcaaggtcaaagttaaaagaagtgttcaaaaatgccattcatggttaatacacatgtacactgacatgccaaatgtcagtttcaaacatccgaattcaaaaacataatgacatgtaacagttgtactacttgacaaactagggaaaacaaatgtaagaaactgaagttgccatggcccatggagaaccaaatccatcgatgttctgcacaaaactaaacagttgaattatattttgctttaccactgaaaattccaaccaggttcatacttcaatttcgtgagaacattcgaaataatctttcagaaaagagaggggggggggggggggatatcaacaagagagcagctgccataactcataagctcaatcagttgtcagaaatggaactaggaaaacttgcatcattcagtcattaaacaaatgcagagatcagaattcatgtagaacattaaaatgattaacatcaaaacagatgcatcaaaaatcaatggaagcaatggtaaaagaggccgcaacctcagtaataaacagttaaacaccatattcaggtcaggataactccgaactgcaagtctgaaatattgtcagagataaagtatcagtaccaaatacttcatttatctcatgagatagtaacaacgattcattaattcttcatttctcactcaaaacaaattgggaaatctaaaagcgttaccatccctgaattaacagattactgaacgtgtccacaaaattatatcctgatacaggtgcagctctgtgagttttctcatcacttggaatctttggatcagagctctgtgagttttctcatcacttggaatctttggatcagagaccatctatgcatgttctagccgatggaaaaaacccaagtccatcgccaggtgccaggtccccgcaccaagcaccatggaagctcgcggcggcgtcgcagaagtagatgtggagcgggcaggggttgcacaaatcgacggagaagtagcagcctcgtctgaggaagatcctccggccgctcaggggcgccgattgcgagcttcttctagtgaggcggctgctgcccgtcgccgtgctccagcctgaagcgcatcaaacgccgtctccctcgttgagacgaacctgatgaccatgagcacgaggttgcgggcgagcaccaggaagtacatgcatagcgggcaggggggacctcttcctgatgtcgtcgacggtgacgaagcagaatcggcggaggaagattctccggcctcacagcctctcgggagggcgacacactcgccggtgcataggtcgagcagcacggggccgcggccgcgcgactcggggagctccgcggcgagccaggcacccgggaaggagccgcagaatctcgcgcagcgcgcgtcgccgaggagcccggggcggtgggtgtcctcggagacgacgcagaacaatgaggtcgcggcggtggacggcatgagcagccatgggaggttacacggcgggtgctgctgctgctgctgctgcgcgatggatcgccacggtttgcaaacaccggagaacatggcgtgatcgaggatgcaagggaggtggcggaggatgctgatgaggccatgggagaaggagaagttttgagtctgcaaactttttggtggggatttggggggagaagaagagagtaacggagagattcgttcgggatacgagaaagcaaaaaaaaatgatatggttacacgttttttttcatgaaggtacaataacataacagagccagctgtaaatatattttaagaagataaataagaaggagaagcggggtacagatttatagccagcagtagtatgaactcccagacgcagtgtgaatgacaggtgggaccagatattaatagtatagtactccctccatctacttttgatagtcatagttcatcttgacacacagacaaaggataagtaattctacttatcatccatttaaacatggtactagtcattcctcgtaaccaagcgattcattaatatttacatttctcaatacctatgtagccaatcatgtgtggaaaaatggagagtcacgcaataaattcgagaaaatcattaagagaataggttgttggattgaaatatgcctatcaaaaataaaattttcaaatttagaaatatgactatcaaaattagatggagaaagtatataattattgtatgaatgagctactccctctattctataatgatcatttcgttgtggtatcgagaccaagaagaggcccactacctattttctatttaatccttgtaattaatctccatattaattggctttgagaaacgaaacggcattactgccgctgcatgattacacatgcaagggatgttccgtgctgcatgcagctcgaaaatcgcatggcctactcgatctccgtggtagtaactagttaggccctgtttagatcctctagttttgccattttatagtactttttgttattttggatctaaacactagtagtaaaagttgacaatttgtcatttagcatttgctagtatatagtagcaacttgtactaaaaagtgctttgggaccactccctctctctttctctctctcactttagtgctagaatgtcaaaactttaatatgcatctaaacaccaactaatacttttgcaatgccaaagcttttgccatttgccatttgctattccaaataaatctaaacaggcccttaatccatccaacatgcacatgctaccagtgttaatacgctgatcaaatcggaatatctctacttttgttatgcgctgattattatgaaatggagagagtattaaattggctatagttaaattagaaccagtagttgattatactattaaacttgctcttatgtagctggttttttttttttgaggggaaagatgcaggagaacagatatcttcagttaattagtggtatgcaatggtcagtgggagaagcggagtttcagtttctggtaatgtcgcagaacacctaagcattgctgctttttcttaattgggttggcataataattttcaagaaaatcattctcctgctggggatttatttttttttctggaaaatcattttcattggctgttggtataacacaagcaccagcaaaaattattttcactggctgccctcataaggcagccgctagcgaagacaattttcgctgcggctgtctttattcagctgccaatgaaaatatatttttgctggcgactgtcttaagacggccgccagcgaaaatatttcttcgcttatagttgataaccgctagcaaagatgttgatcttcactggcctttgctttgtggcggctctaaattctgccagcgaagacccaaaatggccgccacgaaagatggttttcgtagcagtcctattgcgtagttttgattgcctgtgctttgtgaaaagttgttgtggattgggaatcattaccagaatcagcctatgtggtagatggatgacttgcgtggtcagaaacggatgtgatccgagatgtatgcgggcatcatagactaggcttcccgagtggaaacagattgttgtgctgcggggcagcgggactcctggagtccgagaaaataaaaaaggctcagggagccgcttaatcaagtgaaatggctccgtgagccgagaagtaatgatccgacctaagaagtcggtgcattgccatttgagttgctgaaagcatctctcttaagtcgaatcgagatgcaagtctcttttcgacctaaacttaaagaataaaatcacttagtggtttcaaatcaagtatttgcaaaacaatcttgcctctctttcaagcttgcattaaacacctaagttcccgtgacttgctgagtacataagtactcacccttgctctctctctgtgtgtgtgtatatatatatatatatatatatatatatatatatatatatatatatatagttccttcaccctgaaaatgaagtgaagagaagattagggtttcgtcctggttcccagccgttgcctgtggtattgggtgttagtccattggttccgctgatgttgctgctgctgttgttgttggtgttgtttcgtccgtgtcgtaggttgcattctcgggctgtcctgagtaaataagtcctctatataatttaaggattgcaatgattcataattgtctgcatggttaccagcgctatgtccttggactggtactcagatcacggtctcgtaagaagcggttcgcgccgtttttcctacgacactattggtatttcttacgatcacagataagatccgcaagcgcacggatataccgatgtagcacttcccctacggagtattccaagagtatcgaatccaagggaacgtgtgtgattatctctttctccggttcattcaaggacacaaagctaatgtgggcagaggacagaggatttcctaatgagaaacagtgtctatggaaagcttaactttaatcctaacacaatacttcaggcactggcaacccgctgttcccagatgttgctctactatgtacccggacagggaggacttaagtgctcttgagggctgtcaccacctctacacccacctcaaacgtactgtgggatacgcagcaaccactggagattaattacccagacaccgcgtctacgcaattaataactacactagtgctgatcaaacaataaagcattcactataaataaatagactatagtgaacaatgatcccgtatgctaattaggaactaactaagaagtaattctcactaagcaaatcttaattattcagaatgatatttctattaaagcagagtaattaacaagatacaaaagtaagaggagattaccgacaactccgggatttctccgattccttctaccttactatatccctattataatatataataaagtacactagagcctcttgtaattcagctcatactttggtgtgtgtttacaagtgaggatgagaggggtatttataggtggagaagtgccttgggagtgtggagatgctcgaagcatccaaagagcatcttctctcttgtgttgccaagtgtccaagcttatgacggtttctaccggtgaaaacggccataaccatcattgggaggtggattgctaccgaactggacttgggctggggcgaacggcctctgccagggttcggccgaacccgggacggctctgttcgctccaattttcgtcctggacactcattttgggcccctcaattcattggtatgaatgtttggcccatttggaggtgtttaattgggtttatgggtccaaaactccttaagttcggatacgagtttgattctcatcctccttcatgtatatttcctctcaaccttagtagtttgtcacctgcatatgaatatacaccaacactcgtggaaattgttagaaataagccctaccactatgttggatgtttacaattatggtcttatgcagttattgacggcgttaatttggtacttaacagccgtcaataaacccccacacttagctctttactcgtcccgagtaaaggttaaggattaatgtggaataaaatttcccaagatataatacaagtatacaaattattctaagccatacctgtacgtgtgaacttttgaagtgtctaacttaccatcttggacaattgatgaatggaacggtcgtgactcaagtcctcctttatcctcctgtcaatctcttgggttttttatatatttttgcaaagtagctatactcctcgaataactctctcaaatcactcacgtggtttgatttgtggatcctcaccaaggcatggttgccgatttgtccctattctaaaaggctgtataggtggagctcggtagggatcaatcggggcatacctgcatcacatatattgcaaagccaaaataccggacccaaggagatagcaagtcatactctctgattaagaatgtgcatgtgtgtgatatgtgtatgggtatgtgtatagaaaattttgtggatggaaaaaggaaaataaaagataacaactcctttgtatacctcctcctccaattttctctctttggaattttgagagtgcatggctatctcttttcttctctttttttttcatcatgccccgtactttgtatgagcaagattcaagggaaggctgttatgttgcaatcggttttgttttcaagttttcaacaatctaattgtgtgcttttccacaaccaacagggtaaaatgtaaacaaattgattttcaagtttgcacaacttctagagttggcctcaaagttggttttcccaaaaccaaaccaaatttccaatcttttggagtttagttgtccaaaataaccattcacttctagggactccctatcatgttgtctccctgatagccacttgcttttccaaacatcaggtttcccaaaacacaacaccttttcacaaagcaaggtaaaacgaaaactacgctaaggaatcacctcatatccacccatgatcgtgggcacggctatttgaccagtttgttaacctctgcagagggggtacactttacctacacgatgtcactaacctaggtcacctagcccatgcagaataaccacgtctggtgactttgaggctttcacgacaaggcatttccaaagccgactcagggtcaccttatgccaacgggaggggtccaacgaaccaacaacattttagtttccagaccatgttgtgccggaagccaaggggacctccacaacaccaccctggcgaatccacttgtcccttggcatcaaagcttccctggcctagttagttactcagcctggggtgtcccacttcacctatgcggtcgcacttgttatatgcttagatgtaatcccaaaggaatcggtccttaaaagcgtgatcacttacccctacttggactatggttttaataatcatattatgatcgtgaatataatggcccattgtttaaaccgctgccttcctagtggtatccgtgcatttgcatatttatctatgatcgtaacaaataccaacaatattagcttgtcgttttgtgtaccttggcttgattcatgggaagggatttaaattttaatacataaaatagtttgaaaattggctaatttttgggcgtaacaattttctctaaagatgtgttttacgttacactttcctaaccttacatcttcgttttccacgcacatgcttcccgaagggctagacagtgtttttttaaaaaaatatgtacaaaagttgcttaaaaaatcatattaatctagtttccaaaatattttagctaataattaattagttatgtgctaatctgccactctattatgcgtgataggggttccaaaccttcacaaaggaacacaacctaaattgtgatactaactgtattaaagtttgtaactagacatgcagaaactgtactctctacactgaatgacctattgcaatcaaacaaacctacaatttatccgataaacctatacaattcatccttagtattgtagttaatattaatttactgcattgaagttgagacaatcagatcaaattaggagagccattagatcaaatcgcaatggcttgatgtgcatccctctctattcttctatccaactctacatccaaattgtcacattcgttggcttccacgaccatcaaagctacgagagtaatgcttttaatctggtaaaattaattactatgtggtgactgttaccattcccattatctagtttatatgtatgagaaaggtgcagtgatgtagttatatcatgagattgggctataagctaacagtgtggctggtcatttgtgcagatgagatgaaagggcaacttcatctgaatgtagacattgtcttctctaacatgcctacggtgaatttgccatcaaaactggatcatatttcctcaaagcagatccttccatgaagcaggtggtcccagttcaccaaataattacaaaatgtgatgcatatttttgtgctgatcaataaaacaacaaaatttagatatcaaaatctgcaacaatgtaatgatggtatgcttactatattaaatgtttgtgaagcaacttgtacatcccattggtagcatatagtacatccgtagctctaggaggctttgatggaaaaaagaccatatctgtctgtgctatgccattgctttctaacgtttctgaaagttgagaaattttatggaatagccaaagatgagaacaaaggcggccataaagccaaaatgggcaagtataacatatcctaggaagtcatgtcggacgccaacattatcttccaaaatttggctcattgctacatggctcccaccaggaactgaaatcgatccaccgttccctccaaactgtgatgcaatgacaccatatattgtccaggatactgggtttgcccaatagtaccacctccaccaaattggtattgcctgtaacacatacaccaagttgatgaaggaacctagatacactaaatagtaaataagtaaaataacaacgaaaaagaaaactttgcttgctttaccttcctaaaaataaggaacccagcaaacaagttccaaagagggagtgcaaaggttatgagaatgttcgcaagcagtgcagatggggtgcatgccaccaacatcattccgaaaaatgtgaagtagttgaagcttgaaacaatgaagaatagaaaataaaagaatttgctagctttccaatcgtatccgatcattgcatagatgatgaccgtgtacaaaatcccttgtatgatattgtaaatgaactccacgcttgcctgcgtagatcaaccatataaaatcaaccaccacaccaaaaataatggttgattctgctgcaactctttcttgagtttgtgtgattcacagcattttgcattctattaagaggaaaaagtaaaacgttcacagtcttgagaatggatggatttagtgacaacttagaaatgatacaattgtttctctgcattctaaaagttaacaacttttccaagagaatgtgaaatagattgttgtcctcaaatttaagagaactattgtttactagattagaatggtatgtcatcaacctaagattaaaaaaagaaactagaataagtacacaagtgactactctttgctaatactattttaaacttacgtttgtgctcttatatttgcaagcatatctagttctctaatcaccttttattttaatagtttttcaatatcttggagtgccacagcattgatgtccctttttatttggaatgttttgaatataaacaaaattgtcagatttcattcaaaatggctgataaatataaacaagcatgcgatgttacctgagcaaatgcataggacaatggagagtacattcctgctgcgctttcacgatagtaaactgctctctcaattgatacaacaggctgaactgacatgcagttagtagccccaatgaagaagattgcagcataagtggctccgagtaaattgtacaaatcttgctgtgagtctctgtgcattacatatataaaacacactttagcccaccgaagactataatatggtatcaaactatatttccaagtagagaacttacaactttgttcctttttgccaaaatactgtgccaaagaaaaggccatagagaaacgttgttagataacgcaagctattgtaagatggattcttccaataagacttatattgcttccataagttcgcaacacattggatatagaaactttgagaatattttgtagcaaataagagatctcgatagcctggtgggggaatgctcaactcctcaataagttcttggtttttcctggcatatttaggaaaggtgaatttagtatgagtcgtacaaatgaccgcttcaattttttagaactcataatcatttttatgtaaacaaaaaccaataatacaaaatattgtcaaacaaagtttcaacaattgagaatgcttacctataaagcagggaattggcataaatttcagcaaaatctacgttcatgcgagcttcttctagagtggagctaacttctagcatccatgttgcaggattatatccttctgtaatacttggaacacctaaaattgtctgcacaacaaatgtatcttttgtgataaatataaaaatttgttgcaccttaatggagttgaaccatgtccatgtttattgacttttcatagctaacatatcatactattaatcagagtgtgtattcaacttcagaaagaagcaaaacataactgacctcaaaatattcaactagtttatgtgagtggtcaccaagttcaccagcataaataacccgacctcctcttttcaaaagcaaaagctggattaaataaccaattgaaagttaatagcatttgtggtactcaaaaagctatgtatgaatagttcacatatccatgcataaattgcacaaacttaacatagtagccaaacatagagacaattgcatgtgtatgtgagagagacctcatcaaaagactcaaaaatatcaatgcttggctgatggatcgtgcagaccacagtacgcccagtgttgacagtatttctcacagttcgcatgacaattgctgcagctctagcatcaagaccagaagtaggctcatccataaagatgattgaaggatttgctaccagctccacagcaattgttaatcgctttctttgttcagtcgataaaccgctaactccagggagaccaaccatagcattgcacaatacatcaagctctacaagggccatgacctcctccacaaacatctaaatttattaaaattgtttatttgatcagaaataaccatgttgggagttttaaatctgcatataaatgcatattaagtgaaaatgtggcttagaaaaaacctttcttgtattgctatcaacatctgagggaaggcgcaaccaagcagagtagagaatggattcatatacagtaacatttggtgaatggatatcagcttgttcacagtagccgctaatgcgagcaaacgtttcttgtttcttggagtaaccagaaagggttatgcttccttcaattgttccactagttttccttcctgctaagacatccatcaaagtggtctttccagctccactgacaccaactaatgcagttagaagacctggcctaaaagcaccactaatatcagagagcagttggagacgactttccatgagtccttgttgcttcatttcctaaatgacaaaagatagcacatgtaactatataactataactatatatatatatatatatatatatatatatatatatatatatatatatatatatatatatatatatatatatatatatatatatatgtacttataaattgtcatacaagtcagaatttatttcaaacatgaaatatgaaatgggtaaggtatgcttactgagggcatgtccacataataatttagatggttgaaacaaagtgacaatggttggaaaggtaagacaaattgtgactgagttggcctatttccttctccgttagcacctgctgaaacaaacattgatatttactattgttggaagtttgttatcaacaacttggcatgttacatcattatgggaaaggtccaacaaacgtagtttggactgaaatttttttctgcataattgtattattttaatatagataaagatgatcttactcgtaggtatcgatgatgttgtggtggatgttcgggacctatgctcttcatttcttgtttccgtgtacaactcagtttcattgtgttcatcaataactagtgcgtttgcacttctaatagctaggagagccaatttttgaagtataagtgcccaactgaatagataaacaaagtaataaacatgatgaaaaaacagtggtgcttacgacttaagtatgtaagtgccaagatgtataaggtgttgaacaaaataatgaatcctactagggctccaatggatagccaaaatccccactctccagtgaacaagccttttgactttagaatagcctcacctaccgtttttgcatcaatggttgtgtcattgtttggctgtaataaaaaaaagctcatacattagttgaattgttgccatatttcagggtttgtggttacctcactatgtatttcatagatgtaaggaaaaattactgataaaaacttacaatggcccacctactggccagaaattcgttgatcgatattgcattttggctatacatcataggagatgcccaataacaccagatccaccatggtctaatgtcatctggccacattgcaatcaaataggaggttaatatcactcttgcaaattaaatgtaagtgcaattatgtgatttctcatgacaactgaaataaaaacagatgtaatatgctagatgtttacttacttttacgtatcacaaatcctccaaagacgaagacaataagcaacacaagcatcccaaaactaattgctataaccattgtttgcaagatagcaccaagaaatcgaaacagagccattgccattaggtgagtaacgaagaaagctagaaactgacgaaagaacctaaaattaatcaatagataacttttgtaagattctgcaatgattcatagcactaaaagtcaaaataaatatgtcaggtatgtcgacggatttttagtaccttcctgctgctggtgcaaatcccatcacatagtacgtgatgacaacccagaccgtagcctccacaagagatacaggaacctttattagtatatttgcaaccccaaaggtccatggagggaagaataaaaaatctctatgcttgtagaacacaggaagcttctttactgtcaagtttagctcagaaaggccattgaacatgactgttattaaattgaatgtcaatgccccaagaaatttagtgccatcagaaaattgcccatggggcatctttgttctaagaaacacggtcatagacaagaaagcaagaatgatcaattgggtgaccttgaatatgtaaagaaaagagttgcgtttcatcaacaacttctctctacaaagcacagccttcaatgactcccagttggataatgcatttttcattgttgtcagtgcagcaggatggatttttgatttttcaaatggaatatgttgctccttcatcatttgttggccaatataaaatgacttgaaacgttctgcaaactctgggactgacacataacaataaggctccttgtcaaggaaccaatattgttgctggtctttcttggaagtgacctcttgaaggaagtcagccactgctttcctttgagggcatcgaaagccagaagcttcaaaaaattccaatatattctcgcgtggcccatgatagactatgtatccttctgatagtagaactatgtcgtcaaagagattatatgtctctggcggtggttggaggagagagatcatcacagtttcattcattatatggaccaaatgcctaataaattttacaatatgaaatgtgctagagctatccaagccagtggatatctcatccatgagcaaagcccttgccggtcctgttaacatttcccctaccaccaagaaaagtaataattgtaaacgatatacattctatgactaatttttaatataactgtcaagtttctacctgttgtcacacgcttcatttgtccaccagaaattcctctaatcatctcatcaccaacaatagtatcagcgcaaatgtccagcccaagcacctaacaatgttcaatgatcatttcttgttatttcacccctaatagattacatgcaaaaacataacaataatatcaccttgagaataagatctgttatgatattagtctcttgtccttgcattgcagtagctttcatgaaagcatcgatctcagggtctggcttaatgcctgcattgcgttcccttctagagatttccgtgagcatgtcgtatcttgacccaatacctaagcaccacctagagaaatctaatgtctctcttacggtcatctctgcattatggagatcatattgactaacataggcacttgtccgctctggatagaactcggaaaatttatgtccacaataggtgatattaccaaatacctagattgtgatagaatgaataagcaggtagcagtaatgcatcataagcaatataaaatagtaatattccatgagatgactggatttgaatagaaccttgaggtttttatcaagtttcccagtgagcgctcgcataagtgtgctttttcctgatgatggaggtccaagaaggagagtcatcctgaaaataatactagtcagattaaccacttttttctacttatcatattatggcattaaaatttcttacaactaggtgattccccgcgctttgctgcggaaattactaagcaattctcaagaaaatatctactttcttgtatatacatatatttctattagtatatgtatgtaaaattgattgaatgatggttggaaatagtaaatatgatatgatatcttgattgtattattgtccaattgagtacctgattaaatatatagcatttagatggggtggtgattcatggcgttgtttaattggtgaggaagtggaggggacttttatctaatggctaatactagaaagacttgtcgatccaacggttgaaactattttgatgatgtggctaaatgtggtgcctgtttgtggtctcacttatatagaaagcatagataagaagattggtttctatctgaaatgtttcgcaatctcctctatacccctgaattttgcctcatcccctacatgcccttgagcttttatgttgatctcctctatccttattccgttagttgaccatgagttgactgttaaatttttctaaaatgaccatattgcccattttccattgctacagttacatgctatctactctacttcataattcacaatatgaaaaattgtaactcatgataaaatcaaatgggacataattatttatttaaaagaaaatttaaacttttgaacaaatttattttttttggacaaaatccatataagagttttagctagaaattgtgaaccaaaattatttatttgttgggttcaaattttgatgaaaacaatgtacgaatatcatgaaatttaatttataatttatttaaaaaattttgatttatttttaaaattgttgtcaaataattatattccctttgtttatttacaaatagattttttttcatataagaattgtgtttttatcattaaactagcacataagtataagagaggggtaatatagtcaatttcaaaaatatttaatggtcaactcacggtcaactaacggaatgggcatagagaagatcaaaataaaaactcaggggtatataagggataaggcaaaattcagaggtacataagggattggatgaattctcaagggtacataggggattttctcatatgcttattatactatacagtgcccatggtggtggcagaatgtagccaccaccctaaatctataaacaaatatattgaggtggtaaatcgatcttgcaactgtaggtggacctaaacttttaatttgtaaatgggccaccctcaactatggatagaccctcacaacacattgtaattacacacaagtataataaaaccttaaatctgcactcctatttccctgccatgacaattcatcccttattctcccgtgcactgctcccctctcccctcccctacacacacgcctctcacctcatccttctaccccaccacctaatccctagccacaaaagaaggtcccatccatggagcacactaatagttctcgaggatctagcttgtctattgtggtggtggctccagaagatcttgaacggctgcggtcatccatccctccagatcagctagcggaactgtcgatagcagccaacaactatcttttatcgagcagattgcacatttttctagattttattattgttatgcacaaaacacattggactaggtattagcacatatttttttacttttgactaggcattgttactaaagctttcactttgtactatttgtccacaagtaatccagtaaatcttcccctccccccatctcaagctcaatcaatggttgcatcagtgtcctattccgcctcaaccacggtcaattgaaaggcaatccttgaacctttctacgatggtgccttggcctcttcctcctccccatccccaaatcatggtttacttcaaaccactccttctttttttttagttttttgtgttaccaaatgtaaatgctgcaaaatttaggtgctaaatgcctgtagaccccgtatgtaaattctatatttctagttgcaaatactataagctgaatggtttgtgaatgcaagagtaagataagcatatgtcactacttttggaaatgattcacggtcatgatttcttcatgtatgggcattttatttattaacaactatgaggaaactaatgattttacaacttcaggggaggtatttatagtcacaatgggaattcatagctcgtgactataaacaggtagtggtttaggatttcagaagaaatggggtgctggtaccgccctcgggcttcaaatagcggtaccaataaacaggtagttgtattgccagaatgctaggcatattagaacaattattagtcattatcttagggaagaaaaattggttatgcttaggattccctggcatgaaaactaatcagttacatttttctggtattaacactaatcaccagcccagaagaggaaagaacaaaaaggaaaggaccatgttgctgcgagcaagtgtttatatgaagaaaagaatgggaaattcgtttaataccacaaaatatggacattttagttttactgcagcgaaatttggtagtacatgttgatattcaaattttcttcgatttccattctcaaattttcttgggtttccatttcaccactattgttcttttcttcctgtgcttaaggattttcatttattttcatttggtgaaataccaaattttcccctacagaaatttgttcatctctaatttctcaacatgtggcctttggaagaagaggcccagaaatcactcaccacattccatctcaacgtcggatcttggatctcgatcatcagctggtttgcgaggtgagcaccctttgttgtccagctcaactctatcaaccctctccactggccattaattggtccatatcttcctcagctccttaattgccttcactgaatgttgaccatgccacaacaggtatggcgtgaacaaggcagttgaaatcaactgtgcagaggtgtccggttaggcattgagtcgagcatgtggaacacggcggtgtgcagaggtattccagtgttggaaataggacacgagggatggattgggcagaagagtagcctatcagacgatgtggatgagtagggatgagcagaggagccgagcagtactacggaggggcagcatggacattggaggatccatacagtgttgtggaggtgcggcacataaggttgttggcaagcttggttcctcggtctcctccccctcttcgtggtacttggtggtgcgctcctcaacaagggatgagaggatcaaagggacaaatggaagggagcgaaaaaaaggagaatatgcgagagcaaagttgagtgaggtaacgagaaaaaaaatatggaaactagctgccatggtattctaatgaacagagaactagttcaggtgataatccaaaataaattatcagtggtataaaggtatgtaaatatgtcttggatgaaattaatttttctataaagaaaacagtatgtcatggttggtaacttggtatggaagagcatgaatggtatgttggtttgataacaatgatttgtggtcatagttataatatagatgcaactactattgcatagatgagtgcaaattttagtatattgtacacgcaaccataggcaacagggaggatagcggttggacaactgagcccccgttactgctacattgtctcctttggtgacctgggaggtgatttgctcacgtccctcttgccctcatcgccaacccatcacaactgccatcggtagccttaggatcacctcccctattccttctcccccttggttttgctttccccattctcctgatatgccctttccatttctttcatatctagccttttcccaacagagctagatttcctaggttgactccatagcaaggtggtggtgggatcacccttgcccttgtttgcagccgttcttagctaactccacatgttgggtgtaacgtgcgagtggcatcccacgcggtgttgtggcacacaaatgcacgtcggcaaatgatcagatagttgtgtagagcaacagctaggaagtggagttgtggccatctgcacgtgtgacctaatgcggctttgaccaagcaacatggtgcccatggtggacctgaggtcacctgttggagttggagcttgcttcggttgccacatggcctgagtgagctagggaaatgctaggtgtgttagaggaggagcagtagtcatccattgtagcgcggaggaggtggtgttggtagaggcttgcgtggaggttgcatccaaagaagcaaatgccaacgctgcttagaccctaacagtagtggcaactcatctccatgtcaaatctgtctccaaatcaagttcgaggggagctttgtggcatcctagcagatctattggaggttttttgcaattatttcatgccttttccaacatggagttgtgaaggattggtgtgaaaaagcatcattctccatcttgaaggcgttttcgtgggtgtcctatctcctccactatcaaaggccctctagttgaaatcctagatatagtttatcaaatcgagttgtgatgtcaatattgtcgacaactcttccttagaggcatttctttggtgatcctaaccacatacatcatacttgggtgtttgtcaagttgctagcaatgtcaattatattgggagcaacgatgaaacctctcccccatctgatggaacacgggattggctttcatggtttgttgggcttcttttgtcctgcctcaaccctatcataatgaagttggtggtcatgtagtcagagttgtggcatcgccggagcgtgacatgttgcaacgatggcataggtccactggagttgggaatgtgggttgggttccatggcatgctttgtttcctagttcttcttagtgaagtcagagttgtctgatcatgggtacgatgttgagatgatgatgatagttcgttggtgtctgtatgcaagagtattattgccctttaacattgctacccatgttttcatgcttggattagcttgttaatgagttggttgtgtccatggttttagttcggtttcccttgaataaatattatgtttggcctcgtttcaccctaaaatgagtcaccttcttgatatatcactgacggttttgctatgatctttaatgaaagagtaaaatgcattggcggtccttaaacttgtagggttgtgtcatatagattcctaaactctcaaaatgcatattcaggtcccagaacatgtcaaagtgtatcatctaagtcccaaattgacacatcccctgtaggatcctacatggcgctgatgtaacaatgccacatggacgtgacgtgtccttttctttttttcttcctttccttttctttttcattttcttcccattcttcttttttttcctttcttcaacacggatcatagagaaaggagaagaaaggggaaaaaagagaagaaaaacagaaaaagggaaaaaattaaatgggtcccatttgtcagtcaaaataatgccatgtcatgtccatgtggcatgccacatcaacgccatgtagtatcctgaaggggttgtggcgatttggtacctagatgacacactatgacaagttctatgacttggatatgcattttgagagtatagggacctaaatgacacaccctacaagtttaagaaccgcccgtacactttactcgtaatgaaaacatattctacacctagccatttaaccattggtccacaacttctttagggttgtgtaagctctacctatggtgtactagtattttagagaaagtatggtaaaattttagttcgcatcttatttgttaactttagtaaaagtaattttgctatctatacatataaattataagacggtgactgcacaccctgatctactaatgctcgataaatgtgttagctaggtcaaatgactttgggtatcaaatgttgtatactccttgtattctcatggtatgtgaaatttgatcttattgttttgaacaacatttatttccttgagtctatacctggatgacttgaggatgccattgacttgctttagtatattgatggtcttcttgtttgaagaaccaaattgtccaataagcccctgccatttaataaaaacaacttcacattctattcatcacgaacatataaataacaaataagcccatattatacccctcaactatcaggcttaacttagaaaaagggaaacattccatatttagtccctgatgtatatatggtcttgattcgattttggtctctcgactatgaaatcaatctttaagtaaaaagtgaaaaataggaaaccaatcactattggtctctgaactcttcaaagtgttcatgattcgtccttaggcctaaaccagggtggtttataatgatgtggtgccacaagtaattctagcaattcaaaaatatatgtataggatatgaaagaaaaaggaggaaactgagcttgacatgtacacattgtagtattttcttctcttttttttgtttgttttgttcttgtttattatttatattgaagtcatcactatttgtccatgtggagttgtggactctatgtaggcatcacatcattgaaaaaacactatggacctagggggctttgagatttgaggaactgtaatgaatgtttccatagataatggaccatatcttgctaagtataggtggtacataagtaaaacatcaaaattttgattttaaaattgtgaactaatattaaaaccagattgtattgcacttagaggggtattttggccggttttgatagtagagggggtgtaaacttttatgtttcatagttaattggtgttttttttacacaaactcaataatttacgggtgtagtatatatagatttatacctataactaaatagcactaatttcttatgttacttatttttttaaagagtaactataagttagaggtggttagcaatggcaggacatgaataggagtgtgacttttttttctcttaggctaggtgatacgcatcttatatacttatatagttcatccccacttagttaatgttatttctctctactctcattaagtcacatcaaatcaattatttctagcctttggatgatacatctatggttcaaattttctcttcttcttctcttataaaaccatgcaatcttaattattttttaggtttaaaataatatcaatttgttttagttttgataatcatattacatatttttttacatattatgtaacttaattttccgtagcaacgcagcggggtatttatctagtttatttagagactatgacgttacggttaagacaataaatactctaaccatttatctataaaaatatacattttattactagtctttcttttttcccctctcatacatcaaagtttccatttacaaaggctaataatagttattgagccattggtaaccgtagtaatgatgtttatctatcctctcttctccctcctgtatatcagtaaatattcctaataaacaaggctaagaacccattactaatgtccacactgtacatgcacaacccatcccaatgaatttcatttagaaaattcaatccctatgcatcaatttatctattatattattaaatcagccttaaaagaagacatcatgtttgctatggaggctagaaattcctacattaatcgaagaaaagaagaaatatctaaaccattagattttaatgcattagattaaagggtgtagatttatcagaaaaaaagttctccaagtatgaaacaaactctacttaatacaaataggagagtcagtcttatctctcacgttacgtcacgcgcaggcatgcatgtttgagtactgattgtatttgggctaggatattgtccgaatgggggaaagggaaaaaaatggataccacatggattccaaataggaaaaataaaatcaaacggacagctttgatatacagatgtggaatcggattttgaagtgaaaaaatatcaagaacatcccgagatcaggccatcgctaagttaagtagcatggtcacggtggttagcgagacttctaaaagtaaaaaatgtaaacccaatgctaatcatgtttgatttttaaaatctcaaaaaaaaaaaagaggggaagcagctggtaggccgtagaggaaaaataaacaccaatgatagtcatgttcagtttttaaaatcttaatgaaaataaagaggagatgcagcgggcagctctagaggagtacagtggcgaagccgctaacggtttaatgaaacttttaaaaagtaaaaaaataaacccaaccgataattatgtttgatttttaaaatcccaatcacaataaagagaggagacagcgggtgggcagtagataagtataatagcgaaaccgctgacggtttggcgggatttctagaatgtaaaaaaataaacccaaacggtaattatgcttgatttttaaaatcccattgacaatgaatagaggaggcagtgaatggaccctagaggagtatagtggcagtatatttggtagcacttttaaaaattataaaaacgaaacccaacaagagaatgaactctaaaaactacgatgtccaatttttaaaggttccaaggactatggatagaaatggtggtagatcaaaaaagcaaataaaggtgtgacaaagaagtaaggggtaacgactggcatgacttttaaaaatataaaattaaaaacacggtgatgataaggtttgatgtttcaaagtcctaagactacaaggcaactattaaacaaaatttaagtaaaattatatgtaagaaatagataattttatttaggtgctagccgcgtaattgcgcgggccacctagctagttctttctcaaaggaccatgcaactctctcgtctaaaggcttagttcagtagctcgtttagcttttgcaactcatttatctatagcacccgttctaaaccaaaaaaactttttatatataagtttattttttaaaaaataaataaaccaatttttaaatttattataattaatactcaattaattatattttagagactagccctattttgcatagcacaaacattccaaacaaaaaacccacgtttgaacggaccaaatagtttgtaatcaagaaccatttaaaatctttatgaaccattggaaatgaactagttctataatatatctctaaccattacaggctaagaaacattagtggcttcggttaaatgttatggcctagttctataatttgacttcgtttgattctatatataatatactatcgtattttgcataacttctctgttttaccatcgtcctacttctacgccatcgatatcgctcactgtgtagatttgctatattgaggaatgatattaattataaaatacacttaaaatttttgcgttctatcattagatgttaatggatcaatttattcattaactgttggtgatattttctctctataaaatagatcagagcaaatatatataatacttcctgtctatgtatattgacgttattttaggactgagttgggactgatctaaggtagtacgtgcctggagaaagttgatggcagagttggaaagggtgggtagggcgcggctggcgacgaaggcgtctgcctggacggagagctcctcgtaccgaatttcgatcttcggaagttcaatgccaaccctgcgtgtatgcagcagcaggaccatgtaaataaacgcgagaaattgaacaaagaaaataaagacttaactgggcttagttggactcaaacttttggcgagacataaaacaaagagaaccattatagaatgattaagtaagtactattgttaactataaacttaaaaagtaaatttatttaaattttaaaagaaatatctatatagaactttcttttcaagaatatatcgtttagctgtttgagaaaaatgtgttaaccgaaaacgaggtagcagttgagctgaaaagctaagtagaagacagcgtgacatgtggtacaacaacgtacgcaggggcggaatcaggcatggggcagctagggcttgagccacatgactagctccataatcccattataatcttgaaaaatactaatttatgaaaatatttgagatctcattagctcagtcctagacgtggaaattttctggctccgccactatacgtacgtacatgtctatgcggtcccttagccggcgcaagaaccgctcgctgtcgtcctgcaagaggcgttccacgagggcgcgggcggcgtcgccggtggcaagcctcccgatgtcgacgagctccaccgccttgccggtgcccgcgtcgtcgtcgtccttgtggtcgtcatcaccatcacgcaggagcgcgctgcggacgacgccgcgtcgcatccggtcgtaggtgggcagcttctcgagcgccgcccaccgcaggtcctcctcctcctcgtcgtggcccctcatcgactgcgcacgccggaacgggtcctccgcctccacctgccggaacgactgcgagatggcggaaccccagctcgggctccgtccgctcgcggacgccaccagcgccgcatggtggcggtggctcatctcgctggctttcttggtcgatcggttgattactcagttggcatgcagcaacttaactcaagcatacgctaagctatatgtgtatatatacgcctagatgccagcatcccacgggcacccgctctatggctccgtttttttctccaataaaagttggatgaagattaagatttttgtggcacgtttttcaaactgctaaacggtgtgttttatggaaaactttctatatgaaagttgctctaaaatatcattttaatctaattttcaagtttataataattaaaactcaatcaatcattcattaataccatctcgttttgtttaaaaaacttactccttatctctatcttcatctacagaagaaatgaagtacgaactatacgtgagtgattagcagctgctaataatttcccccgcagccaatgcttggctgctagctgaccagctgtccatcgtcgtaccatttgttatatacagtacattatataggagtacgttgatatacgcaataatcccttatatgccactaaaaattggtcggatctcttatataccactaaaaattggttctttccttatatgccataagtctaaatttgcgcaccttctcatgccactgccgtcagttgaccgtgtgttgaccgttaactctcaagtaaaaaagacatatttgcctgtctgagttgttaggcatgctctatactcagaagggtaaatacgactttttttctttaaaattaatggtcaacacacggtcaactgacggagagtggcatgagaggttgcgcaaatttagatcaatggcatataaggaaagagccaattttcagtagtatataagggatcaaaccaattttcagtggcatataaggaattctatatgcacagagacaccccaagtgccatgcggtacagccgtgcagggccaccgtttcgaatgcgtgaaggggaccagaattccaaaattccggatgaaaatttgaagaaattttgctaaatttaattaaaaaagattccgctaatttttttaaaaaataaaattttcgatcgagaagtacctcttgcacaggtacccactggtaaacacaaaattttggaaattctgatacggtgtgtagtactgtagtgtactctctcctcttgctagatcaaccggttatgcaaaacaaagcaacacgtgcgtgtactacataagtatatggaccagtatgcttggcacggttgtgggcggtggcacagtacgaggtacacaccgtttttttcttggtaacattaaatggattgcgtacatgtatatatcagatagattctaatatttaatttgggatcggcctacgatcatgtactactactacataaaataattatataatagaataataaatgaagtgtagatgttggaaaatagagaaccgacatctataaatatatatttatatatagtacgtgttatatttttccttcgccctaaaaaaaactgaacttctatagtttaaattttgtcccaccaaaaactaacttctaccatcctacctactctcagcagaagttttatctctttaataccctttacctatctaggggtgaaaacggtacgaaaactgacggaaatcatctttatcgtttttattttcatattttttttcgtaatcgaaatcgaaatcggaaacccggatacgaaaacggaatcgaatattatcgcaaccgaaaacggagcgaaaacgaaccggcgcgaatacggtaacgaaaatttatcggaataaaaataacccctctaactgataaatctaattctcaagtctcaacggtcaacaattcatcgtaaaacacaatcatataagtccaattattaagtatcaacagtacatcacaaaacacaatctatggaacaaattagtaatgctgttgataaatcccaatgtatgaaaaaaatattattatgtaattttagatttgcataacaaatattatttaaaaaataatagccaaacaccatggtataaactattcagtgcttaaaaaaacaatccagggtatttctagaaattccgagaaaaaattccagaaagttttcgacggattgcgagttctgacggaaactgcccttatcattttcgattccgtgtccgagaaagtatttccgaatccgtttccgtttccgaaaaattccgaaaaaattctgaccgacagattccgtttccgaaaataggtccggaatacggaaaattttcgtaccgttttcaccccctacctattactcttactatgttttttatttattaagggcattttagtcattatcactcgccactaatttcaccttgggatgctaggattggattttttttggacggagacagtacttggttgtaaaaaaaaaaactaaaattgggtgcgttatagtttgtctgtgtgtgtcaatatatatatatatatatatatatatatatatatatatataaaataaaactggtgtctatgaggttgttgcgttataaagtgctacacatacacacaaatatatgtgtcagttttcttaaccgtccgataccacatatttttcttagtgagtgtaggagttgagcctatcacttcgttatctttatcctatcctctccctctctcacgttctcacctattcccgtcccccccacccccccccccccgcgcgcgcactacccttctgatgtgaccatggctaacacggatgcaaccattgctcacatcatggatgaacaagaagatatcgagatcaagtactccaagtgctggaatccgattcggccacctactacactactgacttcaaacggccaccgaatctgcatacgacctccgttttcggcctgtgagtacttgatggaaagctcttggagccctctttctaacggatccagcctcttctctgaattccatctcgtgtggccggaatcataggaacaaggtgctgcatcacctataatgggcctatgggcttgtaacttcatttgggacccggcccaggtggggcccatgtggggtgcgccccaagctgatggagcacgaccctaggcacccctaggtcatcctcccaccctatatatagctagttaccccttcagggtttctcgggttttgttagattaaagtttagccattgctacttgcttgcagcgc
